(19) United States
(12) Patent Application Publication
(10) Pub. No.: US 2025/0171549 A1
(43) Pub. Date: May 29, 2025

(54) ANTI-CCR8 ANTIBODIES AND USES THEREOF

(71) Applicants: AMGEN INC., Thousand Oaks, CA (US); AMGEN RESEARCH (MUNICH) GmbH, Munich (DE)

(72) Inventors: Nathan William PIERCE, Mountain View, CA (US); Agnieszka KIELCZEWSKA, Vancouver (CA); Wentao CHEN, Thousand Oaks, CA (US); Olivier NOLAN-STEVAUX, Millbrae, CA (US); Darren L. BATES, Thousand Oaks, CA (US); Lisa WINKEL, Munich (DE); Christoph DAHLHOFF, Geretsried (DE); Tobias RAUM, Eurasburg (DE); Claudia BLUEMEL, Munich (DE); Jonas Karl-Josef HONER, Munich (DE)

(73) Assignees: AMGEN INC., Thousand Oaks, CA (US); AMGEN RESEARCH (MUNICH) GmbH, Munich (DE)

(21) Appl. No.: 19/039,566

(22) Filed: Jan. 28, 2025

Related U.S. Application Data
(62) Division of application No. 17/831,398, filed on Jun. 2, 2022, now Pat. No. 12,258,411.
(60) Provisional application No. 63/197,271, filed on Jun. 4, 2021.
(60) Provisional application No. 63/236,551, filed on Aug. 24, 2021.

(51) Int. Cl. C07K 16/28; A61K 39/00

(52) U.S. Cl. CPC C07K 16/2866; A61K 2039/505; C07K 2317/56; C07K 2317/76; C07K 2317/92

(57) ABSTRACT

The present invention provides anti-CCR8 antibodies and antigen-binding fragments thereof, and methods of making and using said anti-CCR8 antibodies and antigen-binding fragments thereof.

### CROSS REFERENCE TO RELATED APPLICATIONS

[0001] This application claims the benefit of U.S. Provisional Application No. 63/197,271, filed Jun. 4, 2021, and U.S. Provisional Application No. 63/236,551, filed Aug. 24, 2021, each of which is incorporated by reference herein in its entirety.

### DESCRIPTION OF THE TEXT FILE SUBMITTED ELECTRONICALLY

[0002] The present application contains a Sequence Listing, which has been submitted electronically in XML format and is hereby incorporated by reference in its entirety. The computer readable format copy of the Sequence Listing, which was created Jan. 24, 2025, is named A-2656-US04-DIV_ST26 and is 1,813,231 bytes in size.

### FIELD OF THE INVENTION

[0003] The present invention relates to the field of oncology. The present invention relates to anti-CCR8 antibodies having ADCC activity, and treatment of cancer patients with said antibodies. Anti-CCR8 antibodies of the present invention bind a unique epitope, and do not block ligand binding to CCR8. The present invention also relates to methods of treatment with a Treg depleting antibody and one or more of a bispecific T-cell engager molecule, an agonist of a T cell co-stimulatory receptor, and an antagonist of the PD-1/PD-L1 pathway.

### BACKGROUND OF THE INVENTION

[0004] The C-C chemokine receptor type 8 (CCR8) is a member of the beta chemokine receptor family, and is a seven transmembrane G-protein-coupled receptor with a 35 amino acid extracellular N-terminus. CCL1 is a ligand for CCR8, ccr8 and CCL1-induced CCR8 signaling occurs via G proteins. CCL1 binding CCR8 results in intracellular calcium flux that can be inhibited by pertussis toxin. Downstream activation of the RAS/ERK1/2 MAP kinase pathway has been demonstrated in a CCR8 expressing cell line (see e.g., Louahed et al. (2003) “CCR8-dependent activation of the RAS/MAPK pathway mediates anti-apoptotic activity of I-309/CCL1 and vMIP-I”, European J. of Immunology; 33 (2): 494-501).

[0005] Chemokines and their receptors are important for the migration of various cell types into the inflammatory sites. Previous studies of CCR8 and its ligands suggest a role in the proper positioning of activated T cells within antigenic challenge sites and specialized areas of peripheral and lymphoid tissues. CCR8 may also contribute to regulation of monocyte chemotaxis and thymic cell apoptosis (Tiffany et al. (1997) “Identification of CCR8: a human monocyte and thymus receptor for the CC chemokine I-309”, J Exp Med; July 7; 186 (1): 165-70).

[0006] Recent data in multiple tumor types have demonstrated CCR8 expression is a marker for tumor specific T regulatory (Treg) cells (see e.g., Plitas et al. (2016) “Regulatory T Cells Exhibit Distinct Features in Human Breast Cancer”, Immunity; 45 (5): 1122-1134; Villarreal et al. (September 2018) “Targeting CCR8 Induces Protective Antitumor Immunity and Enhances Vaccine-Induced Responses in Colon Cancer” Tumor Biol. And Immun.). CCR8 is expressed with much higher prevalence and at higher levels on the surface of tumor-resident Tregs compared to circulating or normal tissue Tregs and conventional T effector (Teff) cells. Treg cell infiltration in solid tumors is associated with poor clinical outcome, and Tregs suppress the anti-cancer immune response through inhibition of Teff cell cytotoxicity.

[0007] Some data suggest that Treg suppression of the immune response in the tumor can be reduced by blocking CCR8 function, thereby promoting an inflammatory response and reduced tumor volume. Another therapeutic strategy is to deplete tumor Treg cells via anti-CCR8 antibody dependent cell killing (such as ADCC). For ADCC, anti-CCR8 antibodies may induce redirected T cell lysis of tumor-resident CCR8+ Tregs while sparing normal tissue Tregs that have little to no CCR8 expression by preferentially binding to CCR8 on tumor-resident Tregs and depleting these tumor-resident Tregs via ADCC (e.g., Tanaka et al. (2019) “Targeting Treg cells in cancer immunotherapy” European J. of Immun.; 49 (8) 1140-1146).

[0008] Treg depleting antibodies such as anti-CCR8 antibodies are known in the art. For example, PCT publication No. WO 2018/181425 describes an antibody against CCR8 having ADCC activity for use in treating cancer, and it discloses the commercially available rat anti-mouse CCR8 antibody (SA214G2).

[0009] There exists a need for alternative anti-CCR8 antibodies that 1) are able to bind human and cynomolgus monkey CCR8 on tumor-resident Treg cells; 2) lead to specific depletion of tumor-resident Treg cells; 3) demonstrate an acceptable pharmacokinetic profile (compared to anti-CCR8 antibodies that bind a different epitope), and/or 4) display sufficient potency for the treatment of cancer.

[0010] There also exists a need for anti-CCR8 antibodies that do not block binding of ligand (such as CCL1) to CCR8, and/or that bind an epitope on CCR8 wherein the epitope comprises at least one residue at positions 1-12 of SEQ ID NO. 31.

### SUMMARY OF THE INVENTION

[0011] The present invention provides an antibody that binds to human C-C chemokine receptor type 8 (CCR8), or an antigen-binding fragment thereof, wherein said antibody, or antigen-binding fragment thereof, comprises: (a) a heavy chain complementarity-determining region (HCDR) 1 amino acid sequence of SEQ ID NO: 1; (b) an HCDR2 amino acid sequence of SEQ ID NO: 2; (c) an HCDR3 amino acid sequence of SEQ ID NO: 3; (d) a light chain complementarity-determining region (LCDR) 1 amino acid sequence of KSSQSVLYSSNNX₁NYLA (SEQ ID NO: 1235), wherein X₁ is K or R, (c) an LCDR2 amino acid sequence of SEQ ID NO: 5, and (f) an LCDR3 amino acid sequence of SEQ ID NO: 6. In some embodiments, the antibody or antigen-binding fragment comprises an LCDR1 amino acid sequence of SEQ ID NO: 4. In some embodiments, the antibody or antigen binding fragment comprises a heavy chain variable region (HCVR) amino acid sequence of SEQ ID NO: 13, and a light chain variable region (LCVR) comprising the amino acid sequence: DIVMTQSPDSLAVSLGERATINCKSSQSVLYSSNNX₁NYLA WYX₂QKPGQX₃PKLLISWASTRESGVPDRFSGSGSGTDFTLTINSLQAEDVAVYYCQQ YYSIPITFGGGTKVEIKR (SEQ ID NO: 1236), wherein X₁ is K or R, X₂ is H or Q, and/or X₃ is S or P. In some embodiments, the antibody or antigen-binding fragment comprises a heavy chain variable region (HCVR) amino acid sequence of SEQ ID NO: 13 and a light chain variable region (LCVR) amino acid sequence of SEQ ID NO: 14 or SEQ ID NO: 363. In some embodiments, the antibody or antigen-binding fragment comprises a heavy chain (HC) amino acid sequence of SEQ ID NO: 15 and a light chain (LC) amino acid sequence of SEQ ID NO: 16 or SEQ ID NO: 365. In other embodiments, the antibody or antigen-binding fragment comprises two HCs and two LCs, wherein both HCs comprise an amino acid sequence of SEQ ID NO: 15, and both LCs comprise an amino acid sequence of SEQ ID NO: 16. In some embodiments, the antibody or antigen-binding fragment comprises two HCs and two LCs, and wherein both HCs comprise an amino acid sequence of SEQ ID NO: 15, and both LCs comprise an amino acid sequence of SEQ ID NO: 365. In an embodiment, the antibody or antigen-binding fragment thereof, is an antibody.

[0012] The present invention provides an antibody that binds to human CCR8, or an antigen-binding fragment thereof, comprising a heavy chain (HC) and a light chain (LC), wherein the HC comprises a heavy chain variable region (HCVR) and wherein the LC comprises a light chain variable region (LCVR), wherein the HCVR comprises HCDR1, HCDR2, and HCDR3 and the LCVR comprises LCDR1, LCDR2, and LCDR3, and wherein HCDR1 comprises an amino acid sequence of SEQ ID NO: 1; HCDR2 comprises an amino acid sequence of SEQ ID NO: 2; HCDR3 comprises an amino acid sequence of SEQ ID NO: 3; LCDR1 comprises an amino acid sequence of SEQ ID NO: 4; LCDR2 comprises an amino acid sequence of SEQ ID NO: 5; and LCDR3 comprises an amino acid sequence of SEQ ID NO: 6. In an embodiment, the HCVR comprises an amino acid sequence of SEQ ID NO: 13, and the LCVR comprises an amino acid sequence of SEQ ID NO: 14 or SEQ ID NO: 365. In an embodiment, the LCVR comprises an amino acid sequence of SEQ ID NO: 14. In an embodiment, the LCVR comprises an amino acid sequence of SEQ ID NO: 365. In an embodiment, the HC has an amino acid sequence of SEQ ID NO: 15 or SEQ ID NO: 573, and the LC has an amino acid sequence given by SEQ ID NO: 16. In another embodiment, the antibody comprises two HCs and two LCs, wherein each HC has an amino acid sequence of SEQ ID NO: 15 or SEQ ID NO: 573, and each LC has an amino acid sequence of SEQ ID NO: 16. In an embodiment, the antibody or antigen-binding fragment thereof, is an antibody.

[0013] The present invention also provides an antibody that binds to human CCR8, or an antigen-binding fragment thereof, which comprises an HCDR1 amino acid sequence of SEQ ID NO: 839; an HCDR2 amino acid sequence of SEQ ID NO: 840; an HCDR3 amino acid sequence of SEQ ID NO: 841; an LCDR1 amino acid sequence of SEQ ID NO: 842; an LCDR2 amino acid sequence of SEQ ID NO: 843; and an LCDR3 amino acid sequence of SEQ ID NO: 844. In some embodiments, the antibody or antigen-binding fragment comprises an HCVR amino acid sequence of SEQ ID NO: 1017 and an LCVR amino acid sequence of SEQ ID NO: 1018. In some embodiments, the antibody comprises an HC amino acid sequence of SEQ ID NO: 1125 or SEQ ID NO: 1237 and an LC amino acid sequence of SEQ ID NO: 1126. In some embodiments, the antibody comprises an HC amino acid sequence of SEQ ID NO: 1125 and an LC amino acid sequence of SEQ ID NO: 1126. In some embodiments, the antibody comprises an HC amino acid sequence of SEQ ID NO: 1237 and an LC amino acid sequence of SEQ ID NO: 1126. For example, the antibody may comprise two HCs and two LCs, wherein both HCs comprise an amino acid sequence of SEQ ID NO: 1125 or SEQ ID NO: 1237, and both LCs comprise an amino acid sequence of SEQ ID NO: 1126. In an embodiment, the antibody or antigen-binding fragment thereof, is an antibody.

[0014] The present invention also provides an antibody that binds to human CCR8, or an antigen-binding fragment thereof, which comprises an HCDR1 amino acid sequence of SEQ ID NO: 845; an HCDR2 amino acid sequence of SEQ ID NO: 846; an HCDR3 amino acid sequence of SEQ ID NO: 847; an LCDR1 amino acid sequence of SEQ ID NO: 848; an LCDR2 amino acid sequence of SEQ ID NO: 849; and an LCDR3 amino acid sequence of SEQ ID NO: 850. In some embodiments, the antibody or antigen-binding fragment comprises an HCVR amino acid sequence of SEQ ID NO: 1019 and an LCVR amino acid sequence of SEQ ID NO: 1020. In some embodiments, the antibody comprises an HC amino acid sequence of SEQ ID NO: 1127 or SEQ ID NO: 1238 and an LC amino acid sequence of SEQ ID NO: 1128.

[0015] The present invention further provides an antibody that binds to human CCR8, or an antigen-binding fragment thereof, which comprises: (a) an HCDR1 amino acid sequence of X₁X₂GX₄H, (SEQ ID NO: 1233), wherein (i) X₁ is N, S, D, G, T, or R, (ii) X₂ is C, N, Y, S, or F, and (iii) X₄ is M or F; (b) an HCDR2 amino acid sequence of SEQ ID NOs: 648, 654, 660, 666, 672, 678, 684, 690, 696, 702, 708, 714, 720, 726, 732, 738, 744, 750, 756, 762, 768, 774, 780, 786, 792, 798, 804, 810, 816, 822, 828, 834, 840, 846, 852, 858, 867, 873, 879, 885, 891, 897, 903, 909, 915, 921, 927, 933, 939, or 945, or a variant thereof that comprises 1-4 amino acid substitutions or is at least 90% identical to any one of the foregoing HCDR2 amino acid sequences; (c) an HCDR3 amino acid sequence of SEQ ID NOs: 649, 655, 661, 667, 673, 679, 685, 691, 697, 703, 709, 715, 721, 727, 733, 739, 745, 751, 757, 763, 769, 775, 781, 787, 793, 799, 805, 811, 817, 823, 829, 835, 847, 853, 859, 868, 874, 880, 886, 892, 898, 904, 910, 916, 922, 928, 934, 940, or 946 or a variant thereof that comprises 1-4 amino acid substitutions or is at least 90% identical to any one of the foregoing HCDR3 amino acid sequences; (d) an LCDR1 amino acid sequence of SEQ ID NOs: 650, 656, 662, 668, 674, 680, 686, 692, 698, 704, 710, 716, 722, 728, 734, 740, 746, 752, 758, 764, 770, 776, 782, 788, 794, 800, 806, 812, 818, 824, 830, 836, 848, 854, 860, 863, 869, 875, 881, 887, 893, 899, 905, 911, 917, 923, 929, 935, or 941 or a variant thereof that comprises 1-4 amino acid substitutions or is at least 90% identical to any one of the foregoing LCDR1 amino acid sequences; (c) an LCDR2 amino acid sequence of RX₂X₃X₄RPS (SEQ ID NO: 1234), wherein (i) X₂ is A, N, D, S, or Q, (ii) X₃ is S, T, N, I, F, or A, and (iii) X₄ is N or V; and (f) an LCDR3 amino acid sequence of SEQ ID NOs: 652, 658, 664, 670, 676, 682, 688, 694, 700, 706, 712, 718, 724, 730, 736, 742, 748, 754, 760, 766, 772, 778, 784, 790, 796, 802, 808, 814, 820, 826, 832, 838, 850, 856, 862, 865, 871, 877, 883, 889, 895, 901, 907, 913, 919, 925, 931, 937, or 943 or a variant thereof that comprises 1-4 amino acid substitutions or is at least 90% identical to any one of the foregoing LCDR3 amino acid sequences. In some embodiments, the HCDR1 comprises an amino acid sequence of SEQ ID NOs: 647, 653, 659, 665, 671, 677, 683, 689, 695, 701, 707, 713, 719, 725, 731, 737, 743, 749, 755, 761, 767, 773, 779, 785, 791, 797, 803, 809, 815, 821, 827, 833, 845, 851, 857, 866, 872, 878, 884, 890, 896, 902, 908, 914, 920, 926, 932, 938, or 944. In some embodiments, the LCDR2 comprises an amino acid sequence of SEQ ID NOs: 651, 657, 663, 669, 675, 681, 687, 693, 699, 705, 711, 717, 723, 729, 735, 741, 747, 753, 759, 765, 771, 777, 783, 789, 795, 801, 807, 813, 819, 825, 831, 837 849, 855, 861, 864, 870, 876, 882, 888, 894, 900, 906, 912, 918, 924, 930, 936, or 942. In some embodiments, the HCVR comprises an amino acid sequence of SEQ ID NOs: 953, 955, 957, 959, 961, 963, 965, 967, 969, 971, 973, 975, 977, 979, 981, 983, 985, 987, 989, 991, 993, 995, 997, 999, 1001, 1003, 1005, 1007, 1009, 1011, 1013, 1015, 1019, 1021, 1023, 1026, 1028, 1030, 1032, 1034, 1036, 1038, 1040, 1042, 1044, 1046, 1048, 1050, or 1052. In some embodiments, the LCVR comprises an amino acid sequence of SEQ ID NOs: 964, 966, 968, 970, 972, 974, 976, 978, 980, 982, 984, 986, 988, 990, 992, 994, 996, 998, 1000, 1002, 1004, 1006, 1008, 1010, 1012, 1014, 1016, 1020, 1022, 1024, 1025, 1027, 1029, 1031, 1033, 1035, 1037, 1039, 1041, 1043, 1045, 1047, 1049, or 1051. In an embodiment, the antibody or antigen-binding fragment thereof, is an antibody.

[0016] In some embodiments, the antibody of or antigen-binding fragment comprises: (a) a HCVR comprising an amino acid sequence of SEQ ID NO: 1019 and a LCVR comprising an amino acid sequence of SEQ ID NO: 1020; (b) a HCVR comprising an amino acid sequence of SEQ ID NO: 1021 and a LCVR comprising an amino acid sequence of SEQ ID NO: 1022; (c) a HCVR comprising an amino acid sequence of SEQ ID NO: 1023 and a LCVR comprising an amino acid sequence of SEQ ID NO: 1024; (d) a HCVR comprising an amino acid sequence of SEQ ID NO: 1026 and a LCVR comprising an amino acid sequence of SEQ ID NO: 1025; (c) a HCVR comprising an amino acid sequence of SEQ ID NO: 1028 and a LCVR comprising an amino acid sequence of SEQ ID NO: 1027; (f) a HCVR comprising an amino acid sequence of SEQ ID NO: 1030 and a LCVR comprising an amino acid sequence of SEQ ID NO: 1029; (g) a HCVR comprising an amino acid sequence of SEQ ID NO: 1032 and a LCVR comprising an amino acid sequence of SEQ ID NO: 1031; (h) a HCVR comprising an amino acid sequence of SEQ ID NO: 1034 and a LCVR comprising an amino acid sequence of SEQ ID NO: 1033; (i) a HCVR comprising an amino acid sequence of SEQ ID NO: 1036 and a LCVR comprising an amino acid sequence of SEQ ID NO: 1035; (j) a HCVR comprising an amino acid sequence of SEQ ID NO: 1038 and a LCVR comprising an amino acid sequence of SEQ ID NO: 1037; (k) a HCVR comprising an amino acid sequence of SEQ ID NO: 1040 and a LCVR comprising an amino acid sequence of SEQ ID NO: 1039; (l) a HCVR comprising an amino acid sequence of SEQ ID NO: 1042 and a LCVR comprising an amino acid sequence of SEQ ID NO: 1041; (m) a HCVR comprising an amino acid sequence of SEQ ID NO: 1044 and a LCVR comprising an amino acid sequence of SEQ ID NO: 1043; (n) a HCVR comprising an amino acid sequence of SEQ ID NO: 1046 and a LCVR comprising an amino acid sequence of SEQ ID NO: 1045; (0) a HCVR comprising an amino acid sequence of SEQ ID NO: 1048 and a LCVR comprising an amino acid sequence of SEQ ID NO: 1047; (p) a HCVR comprising an amino acid sequence of SEQ ID NO: 1050 and a LCVR comprising an amino acid sequence of SEQ ID NO: 1049; or (q) a HCVR comprising an amino acid sequence of SEQ ID NO: 1052 and a LCVR comprising an amino acid sequence of SEQ ID NO: 1051. In an embodiment, the antibody or antigen-binding fragment thereof, is an antibody.

[0017] In some embodiments, the antibody comprises an HC amino acid sequence of SEQ ID NOs: 1127, 1129, 1131, 1134, 1136, 1138, 1140, 1142, 1144, 1146, 1148, 1150, 1152, 1154, 1156, 1158, 1160, or 1238-1254; and an LC amino acid sequence of SEQ ID NOs: 1128, 1130, 1132, 1133, 1135, 1137, 1139, 1141, 1143, 1145, 1147, 1149, 1151, 1153, 1155, 1157, or 1159. For example, in some embodiments, the antibody comprises: (a) an HC amino acid sequence of SEQ ID NO: 1127 or SEQ ID NO: 1238 and a LC amino acid sequence of SEQ ID NO: 1128; (b) an HC amino acid sequence of SEQ ID NO: 1129 or SEQ ID NO: 1239 and a LC amino acid sequence of SEQ ID NO: 1130; (c) an HC amino acid sequence of SEQ ID NO: 1131 or SEQ ID NO: 1240 and a LC amino acid sequence of SEQ ID NO: 1132; (d) an HC amino acid sequence of SEQ ID NO: 1134 or SEQ ID NO: 1241 and a LC amino acid sequence of SEQ ID NO: 1133; (c) an HC amino acid sequence of SEQ ID NO: 1136 or SEQ ID NO: 1242 and a LC amino acid sequence of SEQ ID NO: 1135; (f) an HC amino acid sequence of SEQ ID NO: 1138 or SEQ ID NO: 1243 and a LC amino acid sequence of SEQ ID NO: 1137; (g) an HC amino acid sequence of SEQ ID NO: 1140 or SEQ ID NO: 1244 and a LC amino acid sequence of SEQ ID NO: 1139; (h) an HC amino acid sequence of SEQ ID NO: 1142 or SEQ ID NO: 1245 and a LC amino acid sequence of SEQ ID NO: 1141; (i) an HC amino acid sequence of SEQ ID NO: 1144 or SEQ ID NO: 1246 and a LC amino acid sequence of SEQ ID NO: 1143; (j) an HC amino acid sequence of SEQ ID NO: 1146 or SEQ ID NO: 1247 and a LC amino acid sequence of SEQ ID NO: 1145; (k) an HC amino acid sequence of SEQ ID NO: 1148 or SEQ ID NO: 1248 and a LC amino acid sequence of SEQ ID NO: 1147; (l) an HC amino acid sequence of SEQ ID NO: 1150 or SEQ ID NO: 1249 and a LC amino acid sequence of SEQ ID NO: 1149; (m) an HC amino acid sequence of SEQ ID NO: 1152 or SEQ ID NO: 1250 and a LC amino acid sequence of SEQ ID NO: 1151; (n) an HC amino acid sequence of SEQ ID NO: 1154 or SEQ ID NO: 1251 and a LC amino acid sequence of SEQ ID NO: 1153; (o) an HC amino acid sequence of SEQ ID NO: 1156 or SEQ ID NO: 1252 and a LC amino acid sequence of SEQ ID NO: 1155; (p) an HC amino acid sequence of SEQ ID NO: 1158 or SEQ ID NO: 1253 and a LC amino acid sequence of SEQ ID NO: 1157; or (q) an HC amino acid sequence of SEQ ID NO: 1160 or SEQ ID NO: 1254 and a LC amino acid sequence of SEQ ID NO: 1159. In an embodiment, the antibody or antigen-binding fragment thereof, is an antibody.

[0018] In some embodiments, the antibody or antigen-binding fragment thereof is an antibody. In some embodiments, the antibody or antigen-binding fragment thereof is an antigen-binding fragment thereof. In some embodiments, the antibody or antigen-binding fragment is a single chain variable fragment (scFv). In some embodiments, the antibody or antigen-binding fragment is a Fab. In particular embodiments, the antibody or antigen-binding fragment is a single chain Fab (scFab). In some embodiments, the antigen-binding fragment comprises an amino acid sequence of any one of the anti-CCR8 antibodies or antigen-binding fragments thereof of the present invention.

[0019] The present invention also provides an antibody or antigen-binding fragment thereof, that binds to human CCR8, comprising a heavy chain (HC) and a light chain (LC), wherein the HC comprises a heavy chain variable region (HCVR) and wherein the LC comprises a light chain variable region (LCVR), wherein the HCVR comprises HCDR1, HCDR2, and HCDR3 and the LCVR comprises LCDR1, LCDR2, and LCDR3, and wherein HCDR1 comprises an amino acid sequence of SEQ ID NO: 7; HCDR2 comprises an amino acid sequence of SEQ ID NO: 8, SEQ ID NO: 367, or SEQ ID NO: 377; HCDR3 comprises an amino acid sequence of SEQ ID NO: 9; LCDR1 comprises an amino acid sequence of SEQ ID NO: 10, SEQ ID NO: 369, or SEQ ID NO: 379; LCDR2 comprises an amino acid sequence of SEQ ID NO: 11; and LCDR3 comprises an amino acid sequence of SEQ ID NO: 12. In an embodiment, the HCDR2 comprises an amino acid sequence of SEQ ID NO: 8. In an embodiment, the HCDR2 comprises an amino acid sequence of SEQ ID NO: 367. In an embodiment, the HCDR2 comprises an amino acid sequence of SEQ ID NO: 377. In an embodiment, the LCDR1 comprises an amino acid sequence of SEQ ID NO: 10. In an embodiment, the LCDR1 comprises an amino acid sequence of SEQ ID NO: 369. In an embodiment, the LCDR1 comprises an amino acid sequence of SEQ ID NO: 379. In an embodiment, the HCVR comprises an amino acid sequence of SEQ ID NO: 17, SEQ ID NO: 372, or SEQ ID NO: 382, and the LCVR comprises an amino acid sequence of SEQ ID NO: 18, SEQ ID NO: 373, or SEQ ID NO: 383. In an embodiment, the HCVR comprises an amino acid sequence of SEQ ID NO: 17. In an embodiment, the HCVR comprises an amino acid sequence of SEQ ID NO: 372. In an embodiment, the HCVR comprises an amino acid sequence of SEQ ID NO: 382. In an embodiment, the LCVR comprises an amino acid sequence of SEQ ID NO: 18. In an embodiment, the LCVR comprises an amino acid sequence of SEQ ID NO: 373. In an embodiment, the LCVR comprises an amino acid sequence of SEQ ID NO: 383. In an embodiment, the HC comprises an amino acid sequence of SEQ ID NO: 19, SEQ ID NO: 374, or SEQ ID NO: 384, and the LC comprises an amino acid sequence of SEQ ID NO: 20, SEQ ID NO: 375, or SEQ ID NO: 385. In an embodiment, the HC comprises an amino acid sequence of SEQ ID NO: 19. In an embodiment, the HC comprises an amino acid sequence of SEQ ID NO: 374. In an embodiment, the HC comprises an amino acid sequence of SEQ ID NO: 384. In an embodiment, the LC comprises an amino acid sequence of SEQ ID NO: 20. In an embodiment, the LC comprises an amino acid sequence of SEQ ID NO: 375. In an embodiment, the LC comprises an amino acid sequence of SEQ ID NO: 385. In another embodiment, the antibody comprises two HCs and two LCs, wherein each HC comprises an amino acid sequence of SEQ ID NO: 19, SEQ ID NO: 374, or SEQ ID NO: 384, and each LC comprises an amino acid sequence of SEQ ID NO: 20, SEQ ID NO: 375, or SEQ ID NO: 385. In an embodiment, each HC comprises an amino acid sequence of SEQ ID NO: 19. In an embodiment, each HC comprises an amino acid sequence of SEQ ID NO: 374. In an embodiment, each HC comprises an amino acid sequence of SEQ ID NO: 384. In an embodiment, each LC comprises an amino acid sequence of SEQ ID NO: 20. In an embodiment, each LC comprises an amino acid sequence of SEQ ID NO: 375. In an embodiment, each LC comprises an amino acid sequence of SEQ ID NO: 385. In an embodiment, the antibody or antigen-binding fragment thereof, is an antibody.

[0020] The present invention provides an antibody or antigen-binding fragment thereof, that binds CCR8, wherein the antibody or antigen-binding fragment comprises HCDR1, HCDR2, HCDR3, LCDR1, LCDR2, LCDR3 comprising amino acid sequences of SEQ ID NO: 1; SEQ ID NO: 2; SEQ ID NO: 3; SEQ ID NO: 4; SEQ ID NO: 5; and SEQ ID NO: 6, respectively. In an embodiment, the antibody or antigen-binding fragment comprises an HCVR and LCVR comprising amino acid sequences of SEQ ID NO: 352 and SEQ ID NO: 353, respectively. In another embodiment, the antibody comprises an HC and LC comprising the amino acid sequences of SEQ ID NO: 354 and 355, respectively. In another embodiment, the antibody comprises an HC and LC comprising the amino acid sequences of SEQ ID NO: 573 and 355, respectively. In an embodiment, the antibody is Antibody 1 IgG1. In an embodiment, the antibody or antigen-binding fragment thereof, is an antibody.

[0021] The present invention provides an antibody or antigen-binding fragment thereof, that binds CCR8, wherein the antibody or antigen-binding fragment comprises HCDR1, HCDR2, HCDR3, LCDR1, LCDR2, LCDR3 comprising amino acid sequences of SEQ ID NO: 1; SEQ ID NO: 2; SEQ ID NO: 3; SEQ ID NO: 4; SEQ ID NO: 5; and SEQ ID NO: 6, respectively. In an embodiment, the antibody or antigen-binding fragment comprises an HCVR and LCVR comprising amino acid sequences of SEQ ID NO: 362 and SEQ ID NO: 363, respectively. In another embodiment, the antibody comprises an HC and LC comprising the amino acid sequences of SEQ ID NO: 364 and 365, respectively. In another embodiment, the antibody comprises an HC and LC comprising the amino acid sequences of SEQ ID NO: 574 and 365, respectively. In an embodiment, the antibody is Antibody 1.1 IgG1. In an embodiment, the antibody or antigen-binding fragment thereof, is an antibody.

[0022] The present invention provides an antibody or antigen-binding fragment thereof that binds CCR8, wherein the antibody or antigen-binding fragment comprises HCDR1, HCDR2, HCDR3, LCDR1, LCDR2, LCDR3 comprising amino acid sequences of SEQ ID NO: 366; SEQ ID NO: 367; SEQ ID NO: 368; SEQ ID NO: 369; SEQ ID NO: 370; and SEQ ID NO: 371, respectively. In an embodiment, the antibody or antigen-binding fragment comprises an HCVR and LCVR comprising amino acid sequences of SEQ ID NO: 372 and SEQ ID NO: 373, respectively. In another embodiment, the antibody comprises an HC and LC comprising the amino acid sequences of SEQ ID NO: 374 and 375, respectively. In another embodiment, the antibody comprises an HC and LC comprising the amino acid sequences of SEQ ID NO: 575 and 375, respectively. In an embodiment, the antibody is Antibody 2.1 IgG1. In an embodiment, the antibody or antigen-binding fragment thereof, is an antibody.

[0023] The present invention provides an antibody or antigen-binding fragment that binds CCR8, wherein the antibody or antigen-binding fragment comprises HCDR1, HCDR2, HCDR3, LCDR1, LCDR2, LCDR3 comprising amino acid sequences of SEQ ID NO: 376; SEQ ID NO: 377; SEQ ID NO: 378; SEQ ID NO: 379; SEQ ID NO: 380; and SEQ ID NO: 381, respectively. In an embodiment, the antibody or antigen-binding fragment comprises an HCVR and LCVR comprising amino acid sequences of SEQ ID NO: 382 and SEQ ID NO: 383, respectively. In another embodiment, the antibody comprises an HC and LC comprising the amino acid sequences of SEQ ID NO: 384 and 385, respectively. In another embodiment, the antibody comprises an HC and LC comprising the amino acid sequences of SEQ ID NO: 576 and 385, respectively. In an embodiment, the antibody is Antibody 2.2 IgG1. In an embodiment, the antibody or antigen-binding fragment thereof, is an antibody.

[0024] The present invention provides an antibody or antigen-binding fragment that binds CCR8, wherein the antibody or antigen-binding fragment comprises HCDR1, HCDR2, HCDR3, LCDR1, LCDR2, LCDR3 comprising amino acid sequences of SEQ ID NO: 386; SEQ ID NO: 387; SEQ ID NO: 388; SEQ ID NO: 389; SEQ ID NO: 390; and SEQ ID NO: 391, respectively. In an embodiment, the antibody or antigen-binding fragment comprises an HCVR and an LCVR comprising amino acid sequences of SEQ ID NO: 392 and SEQ ID NO: 393, respectively. In another embodiment, the antibody comprises an HC and LC comprising the amino acid sequences of SEQ ID NO: 394 and 395, respectively. In another embodiment, the antibody comprises an HC and LC comprising the amino acid sequences of SEQ ID NO: 577 and 395, respectively. In an embodiment, the antibody is Antibody 3.0 IgG1. In an embodiment, the antibody or antigen-binding fragment thereof, is an antibody.

[0025] The present invention provides an antibody or antigen-binding fragment that binds CCR8, wherein the antibody or antigen-binding fragment comprises HCDR1, HCDR2, HCDR3, LCDR1, LCDR2, LCDR3 comprising amino acid sequences of SEQ ID NO: 396; SEQ ID NO: 397; SEQ ID NO: 398; SEQ ID NO: 399; SEQ ID NO: 400; and SEQ ID NO: 401; respectively. In an embodiment, the antibody or antigen-binding fragment comprises an HCVR and LCVR comprising amino acid sequences of SEQ ID NO: 402 and SEQ ID NO: 403, respectively. In another embodiment, the antibody comprises an HC and LC comprising the amino acid sequences of SEQ ID NO: 404 and 405, respectively. In another embodiment, the antibody comprises an HC and LC comprising the amino acid sequences of SEQ ID NO: 578 and 405, respectively. In an embodiment, the antibody is Antibody 4.0 IgG1. In an embodiment, the antibody or antigen-binding fragment thereof, is an antibody.

[0026] The present invention provides an antibody or antigen-binding fragment that binds CCR8, wherein the antibody or antigen-binding fragment comprises HCDR1, HCDR2, HCDR3, LCDR1, LCDR2, LCDR3 comprising amino acid sequences of SEQ ID NO: 406; SEQ ID NO: 407; SEQ ID NO: 408; SEQ ID NO: 409; SEQ ID NO: 410; and SEQ ID NO: 411; respectively. In an embodiment, the antibody or antigen-binding fragment comprises an HCVR and LCVR comprising amino acid sequences of SEQ ID NO: 412 and SEQ ID NO: 413, respectively. In another embodiment, the antibody comprises an HC and LC comprising the amino acid sequences of SEQ ID NO: 414 and 415, respectively. In another embodiment, the antibody comprises an HC and LC comprising the amino acid sequences of SEQ ID NO: 579 and 415, respectively. In an embodiment, the antibody is Antibody 4.1 IgG1. In an embodiment, the antibody or antigen-binding fragment thereof, is an antibody.

[0027] The present invention provides an antibody or antigen-binding fragment that binds CCR8, wherein the antibody or antigen-binding fragment comprises HCDR1, HCDR2, HCDR3, LCDR1, LCDR2, LCDR3 comprising amino acid sequences of SEQ ID NO: 416; SEQ ID NO: 417; SEQ ID NO: 418; SEQ ID NO: 419; SEQ ID NO: 420; and SEQ ID NO: 421, respectively. In an embodiment, the antibody or antigen-binding fragment comprises an HCVR and LCVR comprising amino acid sequences of SEQ ID NO: 422 and SEQ ID NO: 423, respectively. In another embodiment, the antibody comprises HC and LC comprising amino acid sequences of SEQ ID NO: 424 and 425, respectively. In another embodiment, the antibody comprises an HC and LC comprising the amino acid sequences of SEQ ID NO: 580 and 425, respectively. In an embodiment, the antibody is Antibody 4.2 IgG1. In an embodiment, the antibody or antigen-binding fragment thereof, is an antibody.

[0028] The present invention provides an antibody or antigen-binding fragment that binds CCR8, wherein the antibody or antigen-binding fragment comprises HCDR1, HCDR2, HCDR3, LCDR1, LCDR2, LCDR3 comprising amino acid sequences of SEQ ID NO: 426, SEQ ID NO: 427, SEQ ID NO: 428, SEQ ID NO: 429, SEQ ID NO: 430, and SEQ ID NO: 431, respectively. In an embodiment, the antibody or antigen-binding fragment comprises an HCVR and LCVR comprising amino acid sequences of SEQ ID NO: 432 and SEQ ID NO: 433, respectively. In another embodiment, the antibody comprises an HC and LC comprising amino acid sequences of SEQ ID NO: 434 and 435, respectively. In another embodiment, the antibody comprises an HC and LC comprising the amino acid sequences of SEQ ID NO: 581 and 435, respectively. In an embodiment, the antibody is Antibody 5.0 IgG1. In an embodiment, the antibody or antigen-binding fragment thereof, is an antibody.

[0029] The present invention provides an antibody or antigen-binding fragment that binds CCR8, wherein the antibody or antigen-binding fragment comprises HCDR1, HCDR2, HCDR3, LCDR1, LCDR2, LCDR3 comprising amino acid sequences of SEQ ID NO: 436, SEQ ID NO: 437, SEQ ID NO: 438, SEQ ID NO: 439, SEQ ID NO: 440, and SEQ ID NO: 441, respectively. In an embodiment, the antibody or antigen-binding fragment comprises HCVR and LCVR comprising amino acid sequences of SEQ ID NO: 442 and SEQ ID NO: 443, respectively. In another embodiment, the antibody comprises an HC and LC comprising the amino acid sequences of SEQ ID NO: 444 and 445, respectively. In another embodiment, the antibody comprises an HC and LC comprising the amino acid sequences of SEQ ID NO: 582 and 445, respectively. In an embodiment, the antibody is Antibody 5.1 IgG1. In an embodiment, the antibody or antigen-binding fragment thereof, is an antibody.

[0030] The present invention provides an antibody or antigen-binding fragment that binds CCR8, wherein the antibody or antigen-binding fragment comprises HCDR1, HCDR2, HCDR3, LCDR1, LCDR2, LCDR3 comprising amino acid sequences of SEQ ID NO: 446; SEQ ID NO: 447; SEQ ID NO: 448; SEQ ID NO: 449; SEQ ID NO: 450; and SEQ ID NO: 451, respectively. In an embodiment, the antibody or antigen-binding fragment comprises an HCVR and LCVR comprising amino acid sequences of SEQ ID NO: 452 and SEQ ID NO: 453, respectively. In another embodiment, the antibody comprises an HC and LC comprising the amino acid sequences of SEQ ID NO: 454 and 455, respectively. In another embodiment, the antibody comprises an HC and LC comprising the amino acid sequences of SEQ ID NO: 583 and 455, respectively. In an embodiment, the antibody is Antibody 5.2 IgG1. In an embodiment, the antibody or antigen-binding fragment thereof, is an antibody.

[0031] The present invention provides an antibody or antigen-binding fragment that binds CCR8, wherein the antibody or antigen-binding fragment comprises HCDR1, HCDR2, HCDR3, LCDR1, LCDR2, LCDR3 comprising amino acid sequences of SEQ ID NO: 456, SEQ ID NO: 457, SEQ ID NO: 458, SEQ ID NO: 459, SEQ ID NO: 460, and SEQ ID NO: 461, respectively. In an embodiment, the antibody or antigen-binding fragment comprises an HCVR and LCVR comprising the amino acid sequences of SEQ ID NO: 462 and SEQ ID NO: 463, respectively. In another embodiment, the antibody comprises an HC and LC comprising the amino acid sequences of SEQ ID NO: 464 and 465, respectively. In another embodiment, the antibody comprises an HC and LC comprising the amino acid sequences of SEQ ID NO: 584 and 465, respectively. In an embodiment, the antibody is Antibody 5.3 IgG1. In an embodiment, the antibody or antigen-binding fragment thereof, is an antibody.

[0032] The present invention provides an antibody or antigen-binding fragment that binds CCR8, wherein the antibody or antigen-binding fragment comprises HCDR1, HCDR2, HCDR3, LCDR1, LCDR2, LCDR3 comprising amino acid sequences of SEQ ID NO: 466, SEQ ID NO: 467, SEQ ID NO: 468, SEQ ID NO: 469, SEQ ID NO: 470, and SEQ ID NO: 471, respectively. In an embodiment, the antibody or antigen-binding fragment comprises an HCVR and LCVR comprising the amino acid sequences of SEQ ID NO: 472 and SEQ ID NO: 473, respectively. In another embodiment, the antibody comprises an HC and LC comprising the amino acid sequences of SEQ ID NO: 474 and 475, respectively. In another embodiment, the antibody comprises an HC and LC comprising the amino acid sequences of SEQ ID NO: 585 and 475, respectively. In an embodiment, the antibody is Antibody 5.4 IgG1. In an embodiment, the antibody or antigen-binding fragment thereof, is an antibody.

[0033] The present invention provides an antibody or antigen-binding fragment that binds CCR8, wherein the antibody or antigen-binding fragment comprises HCDR1, HCDR2, HCDR3, LCDR1, LCDR2, LCDR3 comprising amino acid sequences of SEQ ID NO: 476, SEQ ID NO: 477, SEQ ID NO: 478, SEQ ID NO: 479, SEQ ID NO: 480, and SEQ ID NO: 481, respectively. In an embodiment, the antibody or antigen-binding fragment comprises an HCVR and LCVR comprising amino acid sequences of SEQ ID NO: 482 and SEQ ID NO: 483, respectively. In another embodiment, the antibody comprises an HC and LC comprising the amino acid sequences of SEQ ID NO: 484 and 485, respectively. In another embodiment, the antibody comprises an HC and LC comprising the amino acid sequences of SEQ ID NO: 586 and 485, respectively. In an embodiment, the antibody is Antibody 5.5 IgG1. In an embodiment, the antibody or antigen-binding fragment thereof, is an antibody.

[0034] The present invention provides an antibody or antigen-binding fragment that binds CCR8, wherein the antibody or antigen-binding fragment comprises HCDR1, HCDR2, HCDR3, LCDR1, LCDR2, LCDR3 comprising amino acid sequences of SEQ ID NO: 486; SEQ ID NO: 487; SEQ ID NO: 488; SEQ ID NO: 489; SEQ ID NO: 490; and SEQ ID NO: 491, respectively. In an embodiment, the antibody or antigen-binding fragment comprises an HCVR and LCVR comprising amino acid sequences of SEQ ID NO: 492 and SEQ ID NO: 493, respectively. In another embodiment, the antibody comprises an HC and LC comprising the amino acid sequences of SEQ ID NO: 494 and 495, respectively. In another embodiment, the antibody comprises an HC and LC comprising the amino acid sequences of SEQ ID NO: 587 and 495, respectively. In an embodiment, the antibody is Antibody 5.6 IgG1. In an embodiment, the antibody or antigen-binding fragment thereof, is an antibody.

[0035] The present invention provides an antibody or antigen-binding fragment that binds CCR8, wherein the antibody or antigen-binding fragment comprises HCDR1, HCDR2, HCDR3, LCDR1, LCDR2, LCDR3 comprising amino acid sequences of SEQ ID NO: 496; SEQ ID NO: 497; SEQ ID NO: 498; SEQ ID NO: 499; SEQ ID NO: 500; and SEQ ID NO: 501, respectively. In an embodiment, the antibody or antigen-binding fragment comprises an HCVR and LCVR comprising amino acid sequences of SEQ ID NO: 502 and SEQ ID NO: 503, respectively. In another embodiment, the antibody comprises an HC and LC comprising the amino acid sequences of SEQ ID NO: 504 and 505, respectively. In another embodiment, the antibody comprises an HC and LC comprising the amino acid sequences of SEQ ID NO: 588 and 505, respectively. In an embodiment, the antibody is Antibody 5.7 IgG1. In an embodiment, the antibody or antigen-binding fragment thereof, is an antibody.

[0036] The present invention provides an antibody or antigen-binding fragment that binds CCR8, wherein the antibody or antigen-binding fragment comprises HCDR1, HCDR2, HCDR3, LCDR1, LCDR2, LCDR3 comprising amino acid sequences of SEQ ID NO: 506; SEQ ID NO: 507; SEQ ID NO: 508; SEQ ID NO: 509; SEQ ID NO: 510; and SEQ ID NO: 511; respectively. In an embodiment, the antibody or antigen-binding fragment comprises an HCVR and LCVR comprising amino acid sequences of SEQ ID NO: 512 and SEQ ID NO: 513, respectively. In another embodiment, the antibody comprises an HC and LC comprising the amino acid sequences of SEQ ID NO: 514 and 515, respectively. In another embodiment, the antibody comprises an HC and LC comprising the amino acid sequences of SEQ ID NO: 589 and 515, respectively. In an embodiment, the antibody is Antibody 5.8 IgG1. In an embodiment, the antibody or antigen-binding fragment thereof, is an antibody.

[0037] The present invention provides an antibody or antigen-binding fragment that binds CCR8, wherein the antibody or antigen-binding fragment comprises HCDR1, HCDR2, HCDR3, LCDR1, LCDR2, LCDR3 comprising amino acid sequences of SEQ ID NO: 516; SEQ ID NO: 517; SEQ ID NO: 518; SEQ ID NO: 519; SEQ ID NO: 520; and SEQ ID NO: 521, respectively. In an embodiment, the antibody or antigen-binding fragment comprises HCVR and LCVR comprising amino acid sequences of SEQ ID NO: 522 and SEQ ID NO: 523, respectively. In another embodiment, the antibody comprises an HC and LC comprising the amino acid sequences of SEQ ID NO: 524 and 525, respectively. In another embodiment, the antibody comprises an HC and LC comprising the amino acid sequences of SEQ ID NO: 590 and 525, respectively. In an embodiment, the antibody is Antibody 5.9 IgG1. In an embodiment, the antibody or antigen-binding fragment thereof, is an antibody.

[0038] The present invention provides an antibody or antigen-binding fragment that binds CCR8, wherein the antibody or antigen-binding fragment comprises HCDR1, HCDR2, HCDR3, LCDR1, LCDR2, LCDR3 comprising amino acid sequences of SEQ ID NO: 526; SEQ ID NO: 527; SEQ ID NO: 528; SEQ ID NO: 529; SEQ ID NO: 530; and SEQ ID NO: 531; respectively. In an embodiment, the antibody or antigen-binding fragment comprises an HCVR and LCVR comprising amino acid sequences of SEQ ID NO: 532 and SEQ ID NO: 533, respectively. In another embodiment, the antibody comprises an HC and LC comprising the amino acid sequences of SEQ ID NO: 534 and 535, respectively. In another embodiment, the antibody comprises an HC and LC comprising the amino acid sequences of SEQ ID NO: 591 and 535, respectively. In an embodiment, the antibody is Antibody 6.0 IgG1. In an embodiment, the antibody or antigen-binding fragment thereof, is an antibody.

[0039] The present invention provides an antibody or antigen-binding fragment that binds CCR8, wherein the antibody or antigen-binding fragment comprises HCDR1, HCDR2, HCDR3, LCDR1, LCDR2, LCDR3 comprising amino acid sequences of SEQ ID NO: 536; SEQ ID NO: 537; SEQ ID NO: 538; SEQ ID NO: 539; SEQ ID NO: 540; and SEQ ID NO: 541, respectively. In an embodiment, the antibody or antigen-binding fragment comprises an HCVR and LCVR comprising the amino acid sequences of SEQ ID NO: 542 and SEQ ID NO: 543, respectively. In another embodiment, the antibody comprises an HC and LC comprising the amino acid sequences of SEQ ID NO: 544 and 545, respectively. In another embodiment, the antibody comprises an HC and LC comprising the amino acid sequences of SEQ ID NO: 592 and 545, respectively. In an embodiment, the antibody is Antibody 6.1 IgG1. In an embodiment, the antibody or antigen-binding fragment thereof, is an antibody.

[0040] The present invention provides an antibody or antigen-binding fragment that binds CCR8, wherein the antibody or antigen-binding fragment comprises HCDR1, HCDR2, HCDR3, LCDR1, LCDR2, LCDR3 comprising amino acid sequences of SEQ ID NO: 546; SEQ ID NO: 547; SEQ ID NO: 548; SEQ ID NO: 549; SEQ ID NO: 550; and SEQ ID NO: 551, respectively. In an embodiment, the antibody or antigen-binding fragment comprises an HCVR and LCVR comprising amino acid sequences of SEQ ID NO: 552 and SEQ ID NO: 553, respectively. In another embodiment, the antibody comprises an HC and LC comprising the amino acid sequences of SEQ ID NO: 554 and 555, respectively. In another embodiment, the antibody comprises an HC and LC comprising the amino acid sequences of SEQ ID NO: 593 and 555, respectively. In an embodiment, the antibody is Antibody 6.2 IgG1. In an embodiment, the antibody or antigen-binding fragment thereof, is an antibody.

[0041] In some embodiments, the anti-CCR8 antibody or antigen-binding fragment thereof comprises HCDR1, HCDR2, HCDR3, LCDR1, LCDR2, LCDR3, HCVR, LCVR, HC, and/or LC amino acid residues as disclosed in Table 16, Table 17, Table 19, and/or Table 20.

[0042] In another embodiment, the HCDR1, HCDR2, HCDR3, LCDR1, LCDR2, and/or LCDR3 of an antibody or antigen-binding fragment of the present invention comprises a sequence of amino acids that is at least 70%, 75%, 80%, 85%, 90%, 91%, 92%, 93%, 94%, 95%, 96%, 97%, 98%, 99% or 100% identical to the sequence of a HCDR1, HCDR2, HCDR3, LCDR1, LCDR2, and/or LCDR3 sequence of an anti-CCR8 antibody or antigen-binding fragment of the present invention listed herein. In an embodiment, the sequence of amino acids is at least 70% identical. In an embodiment, the sequence of amino acids is at least 80% identical. In an embodiment, the sequence of amino acids is at least 90% identical. In another embodiment, the sequence of amino acids is at least 95% identical. In an embodiment, the antibody or antigen-binding fragment thereof, is an antibody.

[0043] In another embodiment, the HCVR and/or LCVR comprises a sequence of amino acids that is at least 70%, 75%, 80%, 85%, 90%, 91%, 92%, 93%, 94%, 95%, 96%, 97%, 98%, 99% or 100% identical to the sequence of a HCVR and/or LCVR sequence of an anti-CCR8 antibody or antigen-binding fragment of the present invention listed herein. In an embodiment, the sequence of amino acids is at least 70% identical. In an embodiment, the sequence of amino acids is at least 80% identical. In an embodiment, the sequence of amino acids is at least 90% identical. In another embodiment, the sequence of amino acids is at least 95% identical. In an embodiment, the antibody or antigen-binding fragment thereof, is an antibody.

[0044] In another embodiment, the HC and/or LC comprises a sequence of amino acids that is at least 70%, 75%, 80%, 85%, 90%, 91%, 92%, 93%, 94%, 95%, 96%, 97%, 98%, 99% or 100% identical to the sequence of a HC and/or LC sequence of an anti-CCR8 antibody or antigen-binding fragment of the present invention listed herein. In an embodiment, the sequence of amino acids is at least 70% identical. In an embodiment, the sequence of amino acids is at least 80% identical. In an embodiment, the sequence of amino acids is at least 90% identical. In another embodiment, the sequence of amino acids is at least 95% identical. In an embodiment, the antibody or antigen-binding fragment thereof, is an antibody.

[0045] In an embodiment, the present invention provides an afucosylated antibody of the present invention. In an embodiment, an anti-CCR8 antibody of the present invention is human or humanized.

[0046] In some embodiments, an anti-CCR8 antibody or antigen-binding fragment of the present invention can be administered concurrently with, before, or after a variety of drugs and treatments widely employed in cancer treatment such as, for example, chemotherapeutic agents, non-chemotherapeutic agents (e.g., checkpoint inhibitors including anti-PD-1 or anti-PD-L1 inhibitors, such as antagonist antibodies), anti-neoplastic agents, and/or radiation. For example, administration can occur before, during, and/or after any of the treatments described herein. Examples of chemotherapeutic agents are discussed herein and include, but are not limited to, cisplatin, taxol, etoposide, mitoxantrone (Novantrone®), actinomycin D, cycloheximide, camptothecin (or water soluble derivatives thereof), methotrexate, mitomycin (e.g., mitomycin C), dacarbazine (DTIC), anti-neoplastic antibiotics such as adriamycin (doxorubicin) and daunomycin, and all the chemotherapeutic agents mentioned herein. In an embodiment, the antibody or antigen-binding fragment thereof, is an antibody.

[0047] In some embodiments, an anti-CCR8 antibody or antigen-binding fragment of the present invention may be administered concurrently with, before, or after a checkpoint inhibitor such as a PD-1 antagonist antibody or a PD-L1 antagonist antibody. The term “PD-antagonist antibody” refers to an antibody that specifically binds to PD-1 and decreases, blocks, inhibits, abrogates, or interferes with signal transduction resulting from the interaction of PD-1 and one or more of its ligands, such as PD-L1 and PD-L2. In some embodiments, a PD-1 antagonist antibody inhibits the binding of PD-1 to PD-L1 and/or PD-L2. The term “PD-L1 antagonist antibody” refers to an antibody that specifically binds to PD-L1 and decreases, blocks, inhibits, abrogates, or interferes with signal transduction resulting from the interaction of PD-L1 with the PD-1 receptor. In some embodiments, a PD-L1 antagonist antibody inhibits the binding of PD-L1 to PD-1. In some embodiments, the PD-1 antagonist antibody is any one of Antibody 20C1.006 (comprising LCDR1, LCDR2, LCDR3, HCDR1, HCDR2, HCDR3 amino acid sequences of SEQ ID NOs 72-77, respectively; VL and VH amino acid sequences of SEQ ID NOs 78 and 79, respectively; and LC and HC amino acid sequences of SEQ ID NOs 80 and 81, respectively); zeluvalimab (comprising LCDR1, LCDR2, LCDR3, HCDR1, HCDR2, HCDR3 amino acid sequences of SEQ ID NOs 32-37, respectively; VL and VH amino acid sequences of SEQ ID NOs 38 and 39 respectively; LC amino acid sequence of SEQ ID NO: 40; and HC amino acid sequences of SEQ ID NOs 41 or 636); Antibody 20A2.003 (comprising LCDR1, LCDR2, LCDR3, HCDR1, HCDR2, HCDR3 amino acid sequences of SEQ ID NOs 42-47, respectively; VL and VH amino acid sequences of SEQ ID NOs 48 and 49, respectively; and LC and HC amino acid sequences of SEQ ID NOs 50 and 51, respectively); Antibody 22D4.006 (comprising LCDR1, LCDR2, LCDR3, HCDR1, HCDR2, HCDR3 amino acid sequences of SEQ ID NOs 52-57, respectively; VL and VH amino acid sequences of SEQ ID NOs 58 and 59, respectively; and LC and HC amino acid sequences of SEQ ID NOs 60 and 61, respectively); or Antibody 22D4.017 (comprising LCDR1, LCDR2, LCDR3, HCDR1, HCDR2, HCDR3 amino acid sequences of SEQ ID NOs 62-67, respectively; VL and VH amino acid sequences of SEQ ID NOs 68 and 69, respectively; and LC and HC amino acid sequences of SEQ ID NOs 70 and 71, respectively). In one embodiment, the PD-1 antagonist antibody is pembrolizumab. In another embodiment, the PD-1 antagonist antibody is nivolumab. In yet another embodiment, the PD-1 antagonist antibody is cemiplimab. In a particular embodiment, the PD-1 antagonist antibody is zeluvalimab. Zeluvalimab is also known as AMG 404 and is also known as 20C1.009. In an embodiment, the antibody or antigen-binding fragment thereof, is an antibody.

[0048] The present invention provides a method of treating cancer in a patient comprising administering an effective amount of an anti-CCR8 antibody or antigen-binding fragment, wherein the anti-CCR8 antibody or antigen-binding fragment does not block ligand binding to CCR8. In an embodiment, the antibody or antigen-binding fragment thereof, is an antibody.

[0049] The present invention provides a method of treating cancer in a patient comprising administering an effective amount of an anti-CCR8 antibody, wherein the anti-CCR8 antibody has ADCC.

[0050] The present invention provides a method of treating cancer in a patient comprising administering an effective amount of an anti-CCR8 antibody, wherein the anti-CCR8 antibody does not block ligand binding to CCR8 and wherein the anti-CCR8 antibody has ADCC. In an embodiment, the anti-CCR8 antibody further has an acceptable PK. In an embodiment, the anti-CCR8 antibody binds an epitope wherein the epitope comprises at least one residue at positions 1-12 of SEQ ID NO: 31. In an embodiment, the epitope comprises at least two residues at positions 1-12 of SEQ ID NO: 31. In an embodiment, the epitope comprises at least three residues at positions 1-12 of SEQ ID NO: 31. In an embodiment, the epitope comprises at least four residues at positions 1-12 of SEQ ID NO: 31. In an embodiment, the epitope comprises at least five residues at positions 1-12 of SEQ ID NO: 31. In an embodiment, the epitope comprises six or more residues at positions 1-12 of SEQ ID NO: 31. In an embodiment, the epitope comprises seven or more residues at positions 1-12 of SEQ ID NO: 31. In an embodiment, the epitope comprises eight or more residues at positions 1-12 of SEQ ID NO: 31. In an embodiment, the epitope comprises nine or more residues at positions 1-12 of SEQ ID NO: 31. In an embodiment, the epitope comprises ten or more residues at positions 1-12 of SEQ ID NO: 31. In an embodiment, the epitope comprises eleven or more residues at positions 1-12 of SEQ ID NO: 31. In an embodiment, the epitope comprises all twelve amino acid residues at positions 1-12 of SEQ ID NO: 31. In a particular embodiment, the epitope comprises a threonine at position 4 of SEQ ID NO: 31. In a particular embodiment, the epitope comprises a threonine at position 4 of SEQ ID NO: 22. The amino acid sequence of amino acid residues 1-12 of SEQ ID NO: 31 is SEQ ID NO: 82. In an embodiment, the epitope is determined by epitope binning. In an embodiment, the epitope is determined by antibody binding to CCR8 peptide-nanobody complexes. In an embodiment, the epitope is determined by screening antibody binding to CCR8 by phage display. In an embodiment, the epitope is determined by determining binding to a CCR8 peptide expressed in human cells, wherein the peptide comprises an amino acid sequence given by SEQ ID NO: 82. In some embodiments, the epitope is determined by anti-CCR8 antibody binding to the T4R mutation in cynomolgus monkey CCR8. In an embodiment, binding to the T4R mutation is determined in a cell based affinity assay, wherein antibody binding to cells expressing cynomolgus monkey cells CCR8 containing a T4R mutation is compared to antibody binding to cells expressing wild-type cynomolgus monkey CCR8 (comprising a threonine at position four). In some embodiments, an anti-CCR8 antibody binds threonine at position four if it shows reduced binding to CCR8 comprising a T4R mutation. In particular embodiments, an anti-CCR8 antibody binds threonine at position four if it shows no detectable binding to CCR8 comprising a T4R mutation. In some embodiments, wild-type cynomolgus monkey CCR8 comprises an amino acid sequence given by SEQ ID NO: 22. In some embodiments, cynomolgus monkey CCR8 comprising a T4R mutation comprises an amino acid sequence given by SEQ ID NO: 556.

[0051] The present invention provides a method of treating cancer in a patient comprising administering an effective amount of an anti-CCR8 antibody, wherein the anti-CCR8 antibody does not block ligand binding to CCR8 and wherein the anti-CCR8 antibody has ADCC. In an embodiment, the anti-CCR8 antibody further has an acceptable PK. In an embodiment, the anti-CCR8 antibody binds an epitope wherein the epitope consists of at least one residue at positions 1-12 of SEQ ID NO: 31. In an embodiment, the epitope consists of at least two residues at positions 1-12 of SEQ ID NO: 31. In an embodiment, the epitope consists of at least three residues at positions 1-12 of SEQ ID NO: 31. In an embodiment, the epitope consists of at least four residues at positions 1-12 of SEQ ID NO: 31. In an embodiment, the epitope comp consists of rises at least five residues at positions 1-12 of SEQ ID NO: 31. In an embodiment, the epitope consists of six or more residues at positions 1-12 of SEQ ID NO: 31. In an embodiment, the epitope consists of seven or more residues at positions 1-12 of SEQ ID NO: 31. In an embodiment, the epitope consists of eight or more residues at positions 1-12 of SEQ ID NO: 31. In an embodiment, the epitope consists of nine or more residues at positions 1-12 of SEQ ID NO: 31. In an embodiment, the epitope consists of ten or more residues at positions 1-12 of SEQ ID NO: 31. In an embodiment, the epitope consists of eleven or more residues at positions 1-12 of SEQ ID NO: 31. In an embodiment, the epitope consists of all twelve amino acid residues at positions 1-12 of SEQ ID NO: 31. In a particular embodiment, the epitope consists of a threonine at position 4 of SEQ ID NO: 31. In a particular embodiment, the epitope consists of a threonine at position 4 of SEQ ID NO: 22. In an embodiment, the epitope is determined by epitope binning. In an embodiment, the epitope is determined by antibody binding to CCR8 peptide-nanobody complexes. In an embodiment, the epitope is determined by screening antibody binding to CCR8 by phage display. In an embodiment, the epitope is determined by determining binding to a CCR8 peptide expressed in human cells, wherein the peptide comprises an amino acid sequence given by SEQ ID NO: 82. In some embodiments, the epitope is determined by anti-CCR8 antibody binding to the T4R mutation in cynomolgus monkey CCR8. In an embodiment, binding to the T4R mutation is determined in a cell based affinity assay, wherein antibody binding to cells expressing cynomolgus monkey CCR8 containing a T4R mutation is compared to antibody binding to cells expressing wild-type cynomolgus monkey CCR8 (comprising a threonine at position four). In some embodiments, an anti-CCR8 antibody binds threonine at position four if it shows reduced binding to CCR8 comprising a T4R mutation. In particular embodiments, an anti-CCR8 antibody binds threonine at position four if it shows no detectable binding to CCR8 comprising a T4R mutation. In some embodiments, wild-type cynomolgus monkey CCR8 comprises an amino acid sequence given by SEQ ID NO: 22. In some embodiments, cynomolgus monkey CCR8 comprising a T4R mutation comprises an amino acid sequence given by SEQ ID NO: 556.

[0052] The present invention provides a method of treating cancer in a patient comprising administering an effective amount of an anti-CCR8 antibody, wherein the anti-CCR8 antibody does not block ligand binding to CCR8 and wherein the anti-CCR8 antibody has ADCC. In an embodiment, the anti-CCR8 antibody further has an acceptable PK. In an embodiment, the anti-CCR8 antibody binds an epitope wherein the epitope comprises at least one residue of SEQ ID NO: 82. In an embodiment, the epitope comprises at least two residues of SEQ ID NO: 82. In an embodiment, the epitope comprises at least three residues of SEQ ID NO: 82. In an embodiment, the epitope comprises at least four residues of SEQ ID NO: 82. In an embodiment, the epitope comprises at least five residues of SEQ ID NO: 82. In an embodiment, the epitope comprises six or more residues of SEQ ID NO: 82. In an embodiment, the epitope comprises seven or more residues of SEQ ID NO: 82. In an embodiment, the epitope comprises eight or more residues of SEQ ID NO: 82. In an embodiment, the epitope comprises nine or more residues of SEQ ID NO: 82. In an embodiment, the epitope comprises ten or more residues of SEQ ID NO: 82. In an embodiment, the epitope comprises eleven or more residues of SEQ ID NO: 82. In an embodiment, the epitope comprises all twelve amino acid residues of SEQ ID NO: 82. In an embodiment, the epitope is determined by epitope binning. In an embodiment, the epitope is determined by antibody binding to CCR8 peptide-nanobody complexes. In an embodiment, the epitope is determined by screening antibody binding to CCR8 by phage display. In an embodiment, the epitope is determined by determining binding to a CCR8 peptide expressed in human cells, wherein the peptide comprises an amino acid sequence given by SEQ ID NO: 82. In a particular embodiment, the epitope comprises a threonine at position 4 of SEQ ID NO: 82. In a particular embodiment, the epitope comprises a threonine at position 4 of SEQ ID NO: 22. In some embodiments, the epitope is determined by anti-CCR8 antibody binding to the T4R mutation in cynomolgus monkey CCR8. In an embodiment, binding to the T4R mutation is determined in a cell based affinity assay, wherein antibody binding to cells expressing cynomolgus monkey CCR8 containing a T4R mutation is compared to antibody binding to cells expressing wild-type cynomolgus monkey CCR8 (comprising a threonine at position four). In some embodiments, an anti-CCR8 antibody binds threonine at position four if it shows reduced binding to CCR8 comprising a T4R mutation. In particular embodiments, an anti-CCR8 antibody binds threonine at position four if it shows no detectable binding to CCR8 comprising a T4R mutation. In some embodiments, wild-type cynomolgus monkey CCR8 comprises an amino acid sequence given by SEQ ID NO: 22. In some embodiments, cynomolgus monkey CCR8 comprising a T4R mutation comprises an amino acid sequence given by SEQ ID NO: 556.

[0053] The present invention provides a method of treating cancer in a patient comprising administering an effective amount of an anti-CCR8 antibody, wherein the anti-CCR8 antibody does not block ligand binding to CCR8 and wherein the anti-CCR8 antibody has ADCC. In an embodiment, the anti-CCR8 antibody further has an acceptable PK. In an embodiment, the anti-CCR8 antibody binds an epitope wherein the epitope consists of at least one residue of SEQ ID NO: 82. In an embodiment, the epitope consists of at least two residues of SEQ ID NO: 82. In an embodiment, the epitope consists of at least three residues of SEQ ID NO: 82. In an embodiment, the epitope consists of at least four residues of SEQ ID NO: 82. In an embodiment, the epitope consists of rises at least five residues of SEQ ID NO: 82. In an embodiment, the epitope consists of six or more residues of SEQ ID NO: 82. In an embodiment, the epitope consists of seven or more residues of SEQ ID NO: 82. In an embodiment, the epitope consists of eight or more residues of SEQ ID NO: 82. In an embodiment, the epitope consists of nine or more residues of SEQ ID NO: 82. In an embodiment, the epitope consists of ten or more residues of SEQ ID NO: 82. In an embodiment, the epitope consists of eleven or more residues of SEQ ID NO: 82. In an embodiment, the epitope consists of all twelve amino acid residues of SEQ ID NO: 82. In a particular embodiment, the epitope consists of a threonine at position 4 of SEQ ID NO: 82. In a particular embodiment, the epitope consists of a threonine at position 4 of SEQ ID NO: 22. In an embodiment, the epitope is determined by epitope binning. In an embodiment, the epitope is determined by antibody binding to CCR8 peptide-nanobody complexes. In an embodiment, the epitope is determined by screening antibody binding to CCR8 by phage display. In an embodiment, the epitope is determined by determining binding to a CCR8 peptide expressed in human cells, wherein the peptide comprises an amino acid sequence given by SEQ ID NO: 82. In some embodiments, the epitope is determined by anti-CCR8 antibody binding to the T4R mutation in cynomolgus monkey CCR8. In an embodiment, binding to the T4R mutation is determined in a cell based affinity assay, wherein antibody binding to cells expressing cynomolgus monkey CCR8 containing a T4R mutation is compared to antibody binding to cells expressing wild-type cynomolgus monkey CCR8 (comprising a threonine at position four). In some embodiments, an anti-CCR8 antibody binds threonine at position four if it shows reduced binding to CCR8 comprising a T4R mutation. In particular embodiments, an anti-CCR8 antibody binds threonine at position four if it shows no detectable binding to CCR8 comprising a T4R mutation. In some embodiments, wild-type cynomolgus monkey CCR8 comprises an amino acid sequence given by SEQ ID NO: 22. In some embodiments, cynomolgus monkey CCR8 comprising a T4R mutation comprises an amino acid sequence given by SEQ ID NO: 556.

[0054] The present invention also provides a method of treating cancer in a patient comprising administering an effective amount of an anti-CCR8 antibody or antigen-binding fragment of the present invention to the patient. In an embodiment, the cancer is a solid tumor. In a more particular embodiment, the cancer is non-small cell lung cancer, gastric cancer, head and neck squamous cell carcinoma, hepatocellular carcinoma, triple-negative breast cancer, colorectal cancer, pancreatic cancer, or metastatic castrate-resistant prostate cancer. In an embodiment, the cancer is non-small cell lung cancer, gastric cancer, head and neck squamous cell carcinoma, hepatocellular carcinoma, or triple-negative breast cancer. In an embodiment, the cancer is non-small cell lung cancer. In an embodiment, the cancer is colorectal cancer. In an embodiment, the cancer is head and neck squamous cell carcinoma. In some embodiments, the method further comprises administering to the patient a PD-1 antagonist antibody or a PD-L1 antagonist antibody. In some such embodiments, the PD-1 antagonist antibody or PD-L1 antagonist antibody is administered prior to, concurrently with, and/or after administration of the anti-CCR8 antibody or antigen-binding fragment. In particular embodiments, the PD-1 antagonist antibody is pembrolizumab, nivolumab, cemiplimab, or zeluvalimab. In other particular embodiments, the PD-L1 antagonist antibody is atezolizumab, avelumab, or durvalumab. In an embodiment, the antibody or antigen-binding fragment thereof, is an antibody.

[0055] In some embodiments, the method further comprises administering to the patient a chemotherapeutic agent. In some embodiments, the method comprises administering to the patient an anti-CCR8 antibody or antigen-binding fragment of the present invention and a chemotherapeutic agent. In some such embodiments, the chemotherapeutic agent may be administered prior to, concurrently with, or after administration of the anti-CCR8 antibody or antigen-binding fragment of the present invention. In some embodiments, the method comprises administering to the patient an anti-CCR8 antibody of the present invention, a PD-1 or PD-L1 antagonist antibody, and a chemotherapeutic agent. In an embodiment, the antibody or antigen-binding fragment thereof, is an antibody.

[0056] The present invention provides a method of treating cancer in a patient comprising administering to the patient an effective amount of a Treg depleting antibody, a bispecific T-cell engager molecule, an agonist of a T cell co-stimulatory receptor, and/or an antagonist of the PD-1/PD-L1 pathway. In some embodiments, the patient is administered two of a Treg depleting antibody, a bispecific T-cell engager molecule, an agonist of a T cell co-stimulatory receptor, and an antagonist of the PD-1/PD-L1 pathway. In some embodiments, the patient is administered three of a Treg depleting antibody, a bispecific T-cell engager molecule, an agonist of a T cell co-stimulatory receptor, and an antagonist of the PD-1/PD-L1 pathway. In some embodiments, the patient is administered each of a Treg depleting antibody, a bispecific T-cell engager molecule, an agonist of a T cell co-stimulatory receptor, and an antagonist of the PD-1/PD-L1 pathway. In some embodiments, the patient is administered a bispecific T-cell engager molecule, an agonist of a T cell co-stimulatory receptor, and an antagonist of the PD-1/PD-L1 pathway.

[0057] The present invention also provides a method of treating cancer in a patient comprising administering to the patient an effective amount of a Treg depleting antibody and one or more of a bispecific T-cell engager molecule, an agonist of a T cell co-stimulatory receptor, and an antagonist of the PD-1/PD-L1 pathway. In an embodiment, the method comprises administering to the patient an effective amount of a Treg depleting antibody and a bispecific T-cell engager molecule. In an embodiment, the method comprises administering to the patient an effective amount of a Treg depleting antibody and an antagonist of the PD-1/PD-L1 pathway. In an embodiment, the method comprises administering to the patient an effective amount of a Treg depleting antibody and an agonist of a T cell co-stimulatory receptor. In an embodiment, the method comprises administering to the patient an effective amount of a Treg depleting antibody, a bispecific T-cell engager molecule, and an antagonist of the PD-1/PD-L1 pathway. In an embodiment, the method comprises administering to the patient an effective amount of a Treg depleting antibody, a bispecific T-cell engager molecule, an antagonist of the PD-1/PD-L1 pathway, and an agonist of a T cell co-stimulatory receptor.

[0058] In some embodiments, the Treg depleting antibody is an anti-CCR8 antibody. In some embodiments, the Treg depleting antibody is an anti-CTLA4 antibody. In an embodiment, the method comprises administering to the patient an effective amount of an anti-CCR8 antibody and a bispecific T-cell engager molecule. In an embodiment, the method comprises administering to the patient an effective amount of an anti-CCR8 antibody of the present invention and a bispecific T-cell engager molecule. In an embodiment, the method comprises administering to the patient an effective amount of an anti-CTLA-4 antibody and a bispecific T-cell engager molecule. In an embodiment, the method comprises administering to the patient an effective amount of an anti-CCR8 antibody and an antagonist of the PD-1/PD-L1 pathway. In an embodiment, the method comprises administering to the patient an effective amount of an anti-CCR8 antibody of the present invention and an antagonist of the PD-1/PD-L1 pathway. In some such embodiments, the antagonist of the PD-1/PD-L1 pathway is an PD-1 antagonist antibody. Antibody 20C1.006 (comprising LCDR1, LCDR2, LCDR3, HCDR1, HCDR2, HCDR3 amino acid sequences of SEQ ID NOs 72-77, respectively; VL and VH amino acid sequences of SEQ ID NOs 78 and 79, respectively; and LC and HC amino acid sequences of SEQ ID NOs 80 and 81, respectively), zeluvalimab (comprising LCDR1, LCDR2, LCDR3, HCDR1, HCDR2, HCDR3 amino acid sequences of SEQ ID NOs 32-37, respectively; VL and VH amino acid sequences of SEQ ID NOs 38 and 39 respectively; LC amino acid sequence of SEQ ID NO: 40; and HC amino acid sequences of SEQ ID NOs 41 or 636), Antibody 20A2.003 (comprising LCDR1, LCDR2, LCDR3, HCDR1, HCDR2, HCDR3 amino acid sequences of SEQ ID NOs 42-47, respectively; VL and VH amino acid sequences of SEQ ID NOs 48 and 49, respectively; and LC and HC amino acid sequences of SEQ ID NOs 50 and 51, respectively), Antibody 22D4.006 (comprising LCDR1, LCDR2, LCDR3, HCDR1, HCDR2, HCDR3 amino acid sequences of SEQ ID NOs 52-57, respectively; VL and VH amino acid sequences of SEQ ID NOs 58 and 59, respectively; and LC and HC amino acid sequences of SEQ ID NOs 60 and 61, respectively), or Antibody 22D4.017 (comprising LCDR1, LCDR2, LCDR3, HCDR1, HCDR2, HCDR3 amino acid sequences of SEQ ID NOs 62-67, respectively; VL and VH amino acid sequences of SEQ ID NOs 68 and 69, respectively; and LC and HC amino acid sequences of SEQ ID NOs 70 and 71, respectively). In one embodiment, the PD-1 antagonist antibody is pembrolizumab. In another embodiment, the PD-1 antagonist antibody is nivolumab. In yet another embodiment, the PD-1 antagonist antibody is cemiplimab. In a particular embodiment, the PD-1 antagonist antibody is zeluvalimab.

[0059] In an embodiment, the method comprises administering to the patient an effective amount of an anti-CCR8 antibody, a bispecific T-cell engager molecule, and an PD-1 antagonist antibody. In an embodiment, the method comprises administering to the patient an effective amount of an anti-CCR8 antibody of the present invention, a bispecific T-cell engager molecule, and an PD-1 antagonist antibody. In an embodiment, the method comprises administering to the patient an effective amount of an anti-CTLA-4 antibody, a bispecific T-cell engager molecule, and an PD-1 antagonist antibody.

[0060] In an embodiment, the method comprises administering to the patient an effective amount of an anti-CCR8 antibody, a bispecific T-cell engager molecule, an PD-1 antagonist antibody, and an agonist of a T cell co-stimulatory receptor. In an embodiment, the method comprises administering to the patient an effective amount of an anti-CCR8 antibody of the present invention, a bispecific T-cell engager molecule, an PD-1 antagonist antibody, and an agonist of a T cell co-stimulatory receptor. In an embodiment, the method comprises administering to the patient an effective amount of an anti-CTLA-4 antibody, a bispecific T-cell engager molecule, an PD-1 antagonist antibody, and an agonist of a T cell co-stimulatory receptor.

[0061] In some embodiments, the agonist of a T cell co-stimulatory receptor is an agonist of 4-1BB.

[0062] In some embodiments, the bispecific T-cell engager molecule comprises an amino acid sequence of any one of SEQ ID NOs. 87-345 in Table 15.

[0063] In some embodiments, the Treg depleting antibody is an antibody against CTLA-4, CCR8, CD25, TIGIT, CCR4, CD27, CD28, CD39, CD40, CD73, ICOS, OX40, 4-1BB, GITR, LAYN, ILIR2, or IL21R.

[0064] In some embodiments, the Treg depleting antibody is an anti-CTLA-4 antibody.

[0065] In some embodiments, the Treg depleting antibody is an anti-CCR8 antibody. In some such embodiments, the anti-CCR8 antibody is capable of depleting Treg cells. In some embodiments, the anti-CCR8 antibody is an anti-CCR8 antibody that has ADCC activity. In some embodiments, the anti-CCR8 antibody does not block ligand binding to CCR8. In some embodiments, the anti-CCR8 antibody binds human and cynomolgus monkey CCR8 on tumor-resident Treg cells. In some embodiments, the anti-CCR8 antibody binds an epitope on CCR8 wherein the epitope comprises at least one residue at positions 1-12 of SEQ ID NO. 31. In some embodiments, the anti-CCR8 antibody binds an epitope on CCR8 wherein the epitope consists of at least one residue at positions 1-12 of SEQ ID NO. 31. In a particular embodiment, the epitope comprises a threonine at position 4 of SEQ ID NO: 22. The amino acid sequence of amino acid residues 1-12 of SEQ ID NO: 31 is SEQ ID NO: 82. In an embodiment, the epitope is determined by epitope binning. In an embodiment, the epitope is determined by antibody binding to CCR8 peptide-nanobody complexes. In an embodiment, the epitope is determined by screening antibody binding to CCR8 by phage display. In an embodiment, the epitope is determined by determining binding to a CCR8 peptide expressed in human cells, wherein the peptide comprises an amino acid sequence given by SEQ ID NO: 82. In some embodiments, the epitope is determined by anti-CCR8 antibody binding to the T4R mutation in cynomolgus monkey CCR8. In an embodiment, binding to the T4R mutation is determined in a cell based affinity assay, wherein antibody binding to cells expressing cynomolgus monkey CCR8 containing a T4R mutation is compared to antibody binding to cells expressing wild-type cynomolgus monkey CCR8 (comprising a threonine at position four). In some embodiments, an anti-CCR8 antibody binds threonine at position four if it shows reduced binding to CCR8 comprising a T4R mutation. In particular embodiments, an anti-CCR8 antibody binds threonine at position four if it shows no detectable binding to CCR8 comprising a T4R mutation. In some embodiments, wild-type cynomolgus monkey CCR8 comprises an amino acid sequence given by SEQ ID NO: 22. In some embodiments, cynomolgus monkey CCR8 comprising a T4R mutation comprises an amino acid sequence given by SEQ ID NO: 556. In some embodiments, the anti-CCR8 antibody demonstrates an acceptable pharmacokinetic profile. In a particular embodiment, the anti-CCR8 antibody is an anti-CCR8 antibody of the present invention.

[0066] In an embodiment, the agonist of an immune cell co-stimulatory receptor is an agonist of CD2, TNFRSF4 (OX40), TNFRSF5 (CD40), TNFRSF7 (CD27), TNFRSF8 (CD30), TNFRSF9 (4-1BB), TNFRSF14 (HVEM), TNFRSF18 (GITR), TNFR2, or ICOS. In a particular embodiment, the agonist of an immune cell co-stimulatory receptor is a 4-1BB agonist antibody.

[0067] In an embodiment, the antagonist of the PD-1/PD-L1 pathway is a PD-1 antagonist antibody or a PD-L1 antagonist antibody as described herein. In some embodiments, the PD-1 antagonist antibody is any one of Antibody 20C1.006, zeluvalimab, Antibody 20A2.003, Antibody 22D4.006, or Antibody 22D4.017. In one embodiment, the PD-1 antagonist antibody is pembrolizumab. In another embodiment, the PD-1 antagonist antibody is nivolumab. In yet another embodiment, the PD-1 antagonist antibody is cemiplimab. In a particular embodiment, the PD-1 antagonist antibody is zeluvalimab.

[0068] In an embodiment, the Treg depleting antibody is administered at the same time as the bispecific T-cell engager molecule, agonist of an immune cell co-stimulatory receptor, and/or an antagonist of the PD-1/PD-L1 pathway. In an embodiment, the Treg depleting antibody, bispecific T-cell engager molecule, agonist of an immune cell co-stimulatory receptor, and/or an antagonist of the PD-1/PD-L1 pathway are administered at different times. In a particular embodiment, the patient is administered a Treg depleting antibody, a bispecific T-cell engager molecule, an agonist of an immune cell co-stimulatory receptor, and an antagonist of the PD-1/PD-L1 pathway. In another particular embodiment, the patient is administered an anti-CCR8 antibody, a bispecific T-cell engager molecule, a 4-1BB agonist antibody, and an antagonist of the PD-1/PD-L1 pathway. In a particular embodiment, the anti-CCR8 antibody is an anti-CCR8 antibody of the present invention.

[0069] In an embodiment, the cancer is a solid tumor. In a more particular embodiment, the cancer is non-small cell lung cancer, gastric cancer, head and neck squamous cell carcinoma, hepatocellular carcinoma, triple-negative breast cancer, colorectal cancer, pancreatic cancer, or metastatic castrate-resistant prostate cancer. In an embodiment, the cancer is non-small cell lung cancer, gastric cancer, head and neck squamous cell carcinoma, hepatocellular carcinoma, or triple-negative breast cancer. In an embodiment, the cancer is non-small cell lung cancer. In an embodiment, the cancer is colorectal cancer. In an embodiment, the cancer is head and neck squamous cell carcinoma.

[0070] The present invention provides an anti-CCR8 antibody or antigen-binding fragment of the present invention for use in therapy. The present invention also provides an anti-CCR8 antibody or antigen-binding fragment of the present invention for use in treating cancer. In an embodiment, the cancer is a solid tumor. In an embodiment, the cancer is non-small cell lung cancer, gastric cancer, head and neck squamous cell carcinoma, hepatocellular carcinoma, triple-negative breast cancer, colorectal cancer, pancreatic cancer, or metastatic castrate-resistant prostate cancer. In a more particular embodiment, the cancer is non-small cell lung cancer, gastric cancer, head and neck squamous cell carcinoma, hepatocellular carcinoma, or triple-negative breast cancer. In some embodiments, the use further comprises administering to the patient a PD-1 antagonist antibody or a PD-L1 antagonist antibody. In some such embodiments, the PD-1 antagonist antibody or PD-L1 antagonist antibody is administered prior to, concurrently with, and/or after administration of the anti-CCR8 antibody or antigen-binding fragment. In particular embodiments, the PD-1 antagonist antibody is pembrolizumab, nivolumab, cemiplimab, or zeluvalimab. In other particular embodiments, the PD-L1 antagonist antibody is atezolizumab, avelumab, or durvalumab. In some embodiments, the use further comprises administering to the patient a chemotherapeutic agent. In some such embodiments, the chemotherapeutic agent may be administered prior to, concurrently with, or after administration of the anti-CCR8 antibody or antigen-binding fragment. In some embodiments, the use comprises administering to the patient an anti-CCR8 antibody or antigen-binding fragment of the present invention and a chemotherapeutic agent. In some embodiments, the use comprises administering to the patient an anti-CCR8 antibody or antigen-binding fragment of the present invention, a PD-1 or PD-L1 antagonist antibody, and a chemotherapeutic agent. In an embodiment, the anti-CCR8 antibody or antigen-binding fragment thereof, is an antibody.

[0071] The present invention provides an anti-CCR8 antibody or antigen-binding fragment of the present invention for the manufacture of a medicament for the treatment of cancer. In an embodiment, the cancer is a solid tumor. In an embodiment, the cancer is non-small cell lung cancer, gastric cancer, head and neck squamous cell carcinoma, hepatocellular carcinoma, triple-negative breast cancer, colorectal cancer, pancreatic cancer, or metastatic castrate-resistant prostate cancer. In a more particular embodiment, the cancer is non-small cell lung cancer, gastric cancer, head and neck squamous cell carcinoma, hepatocellular carcinoma, or triple-negative breast cancer. In an embodiment, the antibody or antigen-binding fragment thereof, is an antibody.

[0072] The present invention also provides a pharmaceutical composition comprising an anti-CCR8 antibody of the present invention, or an antigen-binding fragment thereof, and one or more pharmaceutically acceptable carriers, diluents, or excipients. In an embodiment, the antibody or antigen-binding fragment thereof, is an antibody.

[0073] In an embodiment, the anti-CCR8 antibody of the present invention comprises a HC encoded by a polynucleotide sequence comprising SEQ ID NO: 594 and a LC encoded by a polynucleotide sequence comprising SEQ ID NO: 595. In a particular embodiment, the HC comprises an amino acid sequence of SEQ ID NO: 354, and the LC comprises an amino acid sequence of SEQ ID NO: 355. In another particular embodiment, the HC comprises an amino acid sequence of SEQ ID NO: 573, and the LC comprises an amino acid sequence of SEQ ID NO: 355.

[0074] In an embodiment, the antibody of the present invention comprises a HC encoded by a polynucleotide sequence comprising SEQ ID NO: 596 and a LC encoded by a polynucleotide sequence comprising SEQ ID NO: 597. In a particular embodiment, the HC comprises an amino acid sequence of SEQ ID NO: 364, and the LC comprises an amino acid sequence of SEQ ID NO: 365. In another particular embodiment, the HC comprises an amino acid sequence of SEQ ID NO: 574, and the LC comprises an amino acid sequence of SEQ ID NO: 365.

[0075] In an embodiment, the antibody of the present invention comprises a HC encoded by a polynucleotide sequence comprising SEQ ID NO: 598 and a LC encoded by a polynucleotide sequence comprising SEQ ID NO: 599. In a particular embodiment, the HC comprises an amino acid sequence of SEQ ID NO: 374, and the LC comprises an amino acid sequence of SEQ ID NO: 375. In another particular embodiment, the HC comprises an amino acid sequence of SEQ ID NO: 575, and the LC comprises an amino acid sequence of SEQ ID NO: 375.

[0076] In an embodiment, the antibody of the present invention comprises a HC encoded by a polynucleotide sequence comprising SEQ ID NO: 600 and a LC encoded by a polynucleotide sequence comprising SEQ ID NO: 601. In a particular embodiment, the HC comprises an amino acid sequence of SEQ ID NO: 384, and the LC comprises an amino acid sequence of SEQ ID NO: 385. In another particular embodiment, the HC comprises an amino acid sequence of SEQ ID NO: 576, and the LC comprises an amino acid sequence of SEQ ID NO: 385.

[0077] In an embodiment, the antibody of the present invention comprises a HC encoded by a polynucleotide sequence comprising SEQ ID NO: 602 and a LC encoded by a polynucleotide sequence comprising SEQ ID NO: 603. In a particular embodiment, the HC comprises an amino acid sequence of SEQ ID NO: 394, and the LC comprises an amino acid sequence of SEQ ID NO: 395. In another particular embodiment, the HC comprises an amino acid sequence of SEQ ID NO: 577, and the LC comprises an amino acid sequence of SEQ ID NO: 395.

[0078] In an embodiment, the antibody of the present invention comprises a HC encoded by a polynucleotide sequence comprising SEQ ID NO: 604 and a LC encoded by a polynucleotide sequence comprising SEQ ID NO: 605. In a particular embodiment, the HC comprises an amino acid sequence of SEQ ID NO: 404, and the LC comprises an amino acid sequence of SEQ ID NO: 405. In another particular embodiment, the HC comprises an amino acid sequence of SEQ ID NO: 578, and the LC comprises an amino acid sequence of SEQ ID NO: 405.

[0079] In an embodiment, the antibody of the present invention comprises a HC encoded by a polynucleotide sequence comprising SEQ ID NO: 606 and a LC encoded by a polynucleotide sequence comprising SEQ ID NO: 607. In a particular embodiment, the HC comprises an amino acid sequence of SEQ ID NO: 414, and the LC comprises an amino acid sequence of SEQ ID NO: 415. In another particular embodiment, the HC comprises an amino acid sequence of SEQ ID NO: 579, and the LC comprises an amino acid sequence of SEQ ID NO: 415.

[0080] In an embodiment, the antibody of the present invention comprises a HC encoded by a polynucleotide sequence comprising SEQ ID NO: 608 and a LC encoded by a polynucleotide sequence comprising SEQ ID NO: 609. In a particular embodiment, the HC comprises an amino acid sequence of SEQ ID NO: 424, and the LC comprises an amino acid sequence of SEQ ID NO: 425. In another particular embodiment, the HC comprises an amino acid sequence of SEQ ID NO: 580, and the LC comprises an amino acid sequence of SEQ ID NO: 425.

[0081] In an embodiment, the antibody of the present invention comprises a HC encoded by a polynucleotide sequence comprising SEQ ID NO: 610 and a LC encoded by a polynucleotide sequence comprising SEQ ID NO: 611. In a particular embodiment, the HC comprises an amino acid sequence of SEQ ID NO: 434, and the LC comprises an amino acid sequence of SEQ ID NO: 435. In another particular embodiment, the HC comprises an amino acid sequence of SEQ ID NO: 581, and the LC comprises an amino acid sequence of SEQ ID NO: 435.

[0082] In an embodiment, the antibody of the present invention comprises a HC encoded by a polynucleotide sequence comprising SEQ ID NO: 612 and a LC encoded by a polynucleotide sequence comprising SEQ ID NO: 613. In a particular embodiment, the HC comprises an amino acid sequence of SEQ ID NO: 444, and the LC comprises an amino acid sequence of SEQ ID NO: 445. In another particular embodiment, the HC comprises an amino acid sequence of SEQ ID NO: 582, and the LC comprises an amino acid sequence of SEQ ID NO: 445.

[0083] In an embodiment, the antibody of the present invention comprises a HC encoded by a polynucleotide sequence comprising SEQ ID NO: 614 and a LC encoded by a polynucleotide sequence comprising SEQ ID NO: 615. In a particular embodiment, the HC comprises an amino acid sequence of SEQ ID NO: 454, and the LC comprises an amino acid sequence of SEQ ID NO: 455. In another particular embodiment, the HC comprises an amino acid sequence of SEQ ID NO: 583, and the LC comprises an amino acid sequence of SEQ ID NO: 455.

[0084] In an embodiment, the antibody of the present invention comprises a HC encoded by a polynucleotide sequence comprising SEQ ID NO: 616 and a LC encoded by a polynucleotide sequence comprising SEQ ID NO: 617. In a particular embodiment, the HC comprises an amino acid sequence of SEQ ID NO: 464, and the LC comprises an amino acid sequence of SEQ ID NO: 465. In another particular embodiment, the HC comprises an amino acid sequence of SEQ ID NO: 584, and the LC comprises an amino acid sequence of SEQ ID NO: 465.

[0085] In an embodiment, the antibody of the present invention comprises a HC encoded by a polynucleotide sequence comprising SEQ ID NO: 618 and a LC encoded by a polynucleotide sequence comprising SEQ ID NO: 619. In a particular embodiment, the HC comprises an amino acid sequence of SEQ ID NO: 474, and the LC comprises an amino acid sequence of SEQ ID NO: 475. In another particular embodiment, the HC comprises an amino acid sequence of SEQ ID NO: 585, and the LC comprises an amino acid sequence of SEQ ID NO: 475.

[0086] In an embodiment, the antibody of the present invention comprises a HC encoded by a polynucleotide sequence comprising SEQ ID NO: 620 and a LC encoded by a polynucleotide sequence comprising SEQ ID NO: 621. In a particular embodiment, the HC comprises an amino acid sequence of SEQ ID NO: 484, and the LC comprises an amino acid sequence of SEQ ID NO: 485. In another particular embodiment, the HC comprises an amino acid sequence of SEQ ID NO: 586, and the LC comprises an amino acid sequence of SEQ ID NO: 485.

[0087] In an embodiment, the antibody of the present invention comprises a HC encoded by a polynucleotide sequence comprising SEQ ID NO: 622 and a LC encoded by a polynucleotide sequence comprising SEQ ID NO: 623. In a particular embodiment, the HC comprises an amino acid sequence of SEQ ID NO: 494, and the LC comprises an amino acid sequence of SEQ ID NO: 495. In another particular embodiment, the HC comprises an amino acid sequence of SEQ ID NO: 587, and the LC comprises an amino acid sequence of SEQ ID NO: 495.

[0088] In an embodiment, the antibody of the present invention comprises a HC encoded by a polynucleotide sequence comprising SEQ ID NO: 624 and a LC encoded by a polynucleotide sequence comprising SEQ ID NO: 625. In a particular embodiment, the HC comprises an amino acid sequence of SEQ ID NO: 504, and the LC comprises an amino acid sequence of SEQ ID NO: 505. In another particular embodiment, the HC comprises an amino acid sequence of SEQ ID NO: 588, and the LC comprises an amino acid sequence of SEQ ID NO: 505.

[0089] In an embodiment, the antibody of the present invention comprises a HC encoded by a polynucleotide sequence comprising SEQ ID NO: 626 and a LC encoded by a polynucleotide sequence comprising SEQ ID NO: 627. In a particular embodiment, the HC comprises an amino acid sequence of SEQ ID NO: 514, and the LC comprises an amino acid sequence of SEQ ID NO: 515. In another particular embodiment, the HC comprises an amino acid sequence of SEQ ID NO: 589, and the LC comprises an amino acid sequence of SEQ ID NO: 515.

[0090] In an embodiment, the antibody of the present invention comprises a HC encoded by a polynucleotide sequence comprising SEQ ID NO: 628 and a LC encoded by a polynucleotide sequence comprising SEQ ID NO: 629. In a particular embodiment, the HC comprises an amino acid sequence of SEQ ID NO: 524, and the LC comprises an amino acid sequence of SEQ ID NO: 525. In another particular embodiment, the HC comprises an amino acid sequence of SEQ ID NO: 590, and the LC comprises an amino acid sequence of SEQ ID NO: 525.

[0091] In an embodiment, the antibody of the present invention comprises a HC encoded by a polynucleotide sequence comprising SEQ ID NO: 630 and a LC encoded by a polynucleotide sequence comprising SEQ ID NO: 631. In a particular embodiment, the HC comprises an amino acid sequence of SEQ ID NO: 534, and the LC comprises an amino acid sequence of SEQ ID NO: 535. In another particular embodiment, the HC comprises an amino acid sequence of SEQ ID NO: 591, and the LC comprises an amino acid sequence of SEQ ID NO: 535.

[0092] In an embodiment, the antibody of the present invention comprises a HC encoded by a polynucleotide sequence comprising SEQ ID NO: 632 and a LC encoded by a polynucleotide sequence comprising SEQ ID NO: 633. In a particular embodiment, the HC comprises an amino acid sequence of SEQ ID NO: 544, and the LC comprises an amino acid sequence of SEQ ID NO: 545. In another particular embodiment, the HC comprises an amino acid sequence of SEQ ID NO: 592, and the LC comprises an amino acid sequence of SEQ ID NO: 545.

[0093] In an embodiment, the antibody of the present invention comprises a HC encoded by a polynucleotide sequence comprising SEQ ID NO: 634 and a LC encoded by a polynucleotide sequence comprising SEQ ID NO: 635. In a particular embodiment, the HC comprises an amino acid sequence of SEQ ID NO: 554, and the LC comprises an amino acid sequence of SEQ ID NO: 555. In another particular embodiment, the HC comprises an amino acid sequence of SEQ ID NO: 593, and the LC comprises an amino acid sequence of SEQ ID NO: 555.

[0094] Also provided herein are one or more nucleic acid sequences encoding the anti-CCR8 antibody or antigen-binding fragment of the present invention. In some embodiments, the present invention provides a DNA molecule comprising a polynucleotide that encodes a HC of an antibody of the present invention. The present invention also provides a DNA molecule comprising a polynucleotide that encodes a LC of an antibody of the present invention. The present invention also provides a DNA molecule comprising a polynucleotide that encodes both a LC of an antibody of the present invention and a HC of an antibody of the present invention. In some embodiments, the invention provides a nucleic acid sequence encoding a heavy chain amino acid sequence of SEQ ID NOs: 1127, 1129, 1131, 1134, 1136, 1138, 1140, 1142, 1144, 1146, 1148, 1150, 1152, 1154, 1156, 1158, or 1160. In other embodiments, the invention provides a nucleic acid sequence encoding a light chain amino acid sequence of SEQ ID NOs: 1128, 1130, 1132, 1133, 1135, 1137, 1139, 1141, 1143, 1145, 1147, 1149, 1151, 1153, 1155, 1157, or 1159.

[0095] The present invention also provides a DNA molecule comprising a polynucleotide that encodes an antibody LC wherein the LC has an amino acid sequence of SEQ ID NO: 16. In an embodiment, the polynucleotide comprises a polynucleotide sequence of SEQ ID NO: 28. The present invention also provides DNA molecules where one DNA molecule comprises a polynucleotide that encodes an antibody HC wherein the HC has an amino acid sequence of SEQ ID NO: 15, and another DNA molecule comprises a polynucleotide that encodes a LC wherein the LC has an amino acid sequence of SEQ ID NO: 16. In an embodiment, the polynucleotide that encodes the antibody HC comprises a polynucleotide sequence of SEQ ID NO: 27, and the polynucleotide that encodes the LC comprises a polynucleotide sequence of SEQ ID NO: 28.

[0096] The present invention further provides a mammalian cell transformed with a DNA molecule of the present invention, wherein the transformed mammalian cell is capable of expressing an antibody of the present invention, wherein the antibody comprises two HCs and two LCs.

[0097] The present invention further provides a mammalian cell transformed with a DNA molecule of the present invention, wherein the transformed mammalian cell is capable of expressing an antibody comprising two HCs and two LCs, wherein each HC comprises an amino acid sequence of SEQ ID NO: 15, and each LC comprises an amino acid sequence of SEQ ID NO: 16.

[0098] The present invention also provides a process for producing an antibody of the present invention, wherein the antibody comprises two HCs and two LCs, and wherein the process comprises cultivating a mammalian cell under conditions such that the antibody is expressed and recovering the expressed antibody. In an embodiment, the mammalian cell is transformed with a DNA molecule of the present invention, wherein the transformed mammalian cell is capable of expressing an antibody of the present invention comprising two HCs and two LCs. The present invention also provides an antibody obtainable by the process.

[0099] The present invention also provides a process for producing an antibody, wherein the antibody comprises two HCs and two LCs, each HC comprises an amino acid sequence of SEQ ID NO: 15 and each LC comprises an amino acid sequence of SEQ ID NO: 16. In an embodiment, the process comprises cultivating a mammalian cell under conditions such that the antibody is expressed and recovering the expressed antibody, and wherein the mammalian cell is transformed with a DNA molecule of the present invention, wherein the transformed mammalian cell is capable of expressing an antibody comprising two HCs and two LCs, wherein each HC comprises an amino acid sequence of SEQ ID NO: 15, and each LC comprises an amino acid sequence of SEQ ID NO: 16. The present invention also provides an antibody obtainable by the process.

[0100] The present invention provides a DNA molecule comprising a polynucleotide that encodes an antibody HC, wherein the HC has an amino acid sequence of SEQ ID NO: 19. In an embodiment, the polynucleotide sequence comprises SEQ ID NO: 29.

[0101] The present invention provides a DNA molecule comprising a polynucleotide that encodes an antibody LC wherein the LC has an amino acid sequence of SEQ ID NO: 20. In an embodiment, the polynucleotide sequence comprises SEQ ID NO: 30.

[0102] The present invention provides a DNA molecule comprising a polynucleotide that encodes an antibody HC wherein the HC has an amino acid sequence of SEQ ID NO: 19. In an embodiment, the polynucleotide that encodes the antibody HC comprises a polynucleotide sequence of SEQ ID NO: 29. The present invention also provides a DNA molecule comprising a polynucleotide that encodes an antibody LC wherein the LC has an amino acid sequence of SEQ ID NO: 20. In an embodiment, the polynucleotide that encodes the LC comprises a polynucleotide sequence of SEQ ID NO: 30. The present invention also provides a mammalian cell transformed with a DNA molecule of the present invention, wherein the transformed mammalian cell is capable of expressing an antibody comprising two HCs and two LCs, wherein each HC comprises an amino acid sequence of SEQ ID NO: 19, and each LC comprises an amino acid sequence of SEQ ID NO: 20.

[0103] In some embodiments, a nucleic acid sequence encoding an HC described herein may comprise any one of SEQ ID NOs: 1195, 1197, 1199, 1201, 1204, 1206, 1208, 1210, 1212, 1214, 1216, 1218, 1220, 1222, 1224, 1226, 1228, or 1230.

[0104] In some embodiments, a nucleic acid sequence encoding an LC described herein may comprise any one of SEQ ID NOs: 1196, 1198, 1200, 1202, 1203, 1205, 1207, 1209, 1211, 1213, 1215, 1217, 1219, 1221, 1223, 1225, 1227, or 1229.

[0105] In some embodiments, a nucleic acid sequence encoding an scFv described herein may comprise any one of SEQ ID NOs: 1163-1194.

[0106] The present invention also provides a process for producing an antibody, wherein the antibody comprises two HCs and two LCs, each HC comprises an amino acid sequence of SEQ ID NO: 19 and each LC comprises an amino acid sequence of SEQ ID NO: 20. In an embodiment, the process comprises cultivating a mammalian cell under conditions such that the antibody is expressed and recovering the expressed antibody, and wherein the mammalian cell is transformed with a DNA molecule of the present invention. In an embodiment, the transformed mammalian cell is capable of expressing an antibody comprising two HCs and two LCs, wherein each HC comprises an amino acid sequence of SEQ ID NO: 19, and each LC comprises an amino acid sequence of SEQ ID NO: 20. The present invention also provides an antibody obtainable by the process.

[0107] The present invention also provides a process for producing an antibody comprising two HCs and two LCs, wherein the process comprises cultivating the above-described mammalian cell under conditions such that the antibody is expressed and recovering the expressed antibody, wherein: (a) both HCs comprise an amino acid sequence of SEQ ID NOs: 15, 1125, 1127, 1129, 1131, 1134, 1136, 1138, 1140, 1142, 1144, 1146, 1148, 1150, 1152, 1154, 1156, 1158, or 1160, or an amino acid sequence that is at least 90% identical to any one of the foregoing HC amino acid sequences; and (b) both LCs comprise an amino acid sequence of SEQ ID NOs: 16, 365, 1126, 1128, 1130, 1132, 1133, 1135, 1137, 1139, 1141, 1143, 1145, 1147, 1149, 1151, 1153, 1155, 1157, or 1159, or an amino acid sequence that is at least 90% identical to any one of the foregoing LC amino acid sequences.

[0108] In another embodiment, the present invention provides an antibody or antigen-binding fragment thereof that binds human CCR8 at an epitope wherein the epitope comprises at least one residue at positions 1-12 of SEQ ID NO: 31. In an embodiment, the epitope comprises at least two residues at positions 1-12 of SEQ ID NO: 31. In an embodiment, the epitope comprises at least three residues at positions 1-12 of SEQ ID NO: 31. In an embodiment, the epitope comprises at least four residues at positions 1-12 of SEQ ID NO: 31. In an embodiment, the epitope comprises at least five residues at positions 1-12 of SEQ ID NO: 31. In an embodiment, the epitope comprises six or more residues at positions 1-12 of SEQ ID NO: 31. In an embodiment, the epitope comprises seven or more residues at positions 1-12 of SEQ ID NO: 31. In an embodiment, the epitope comprises eight or more residues at positions 1-12 of SEQ ID NO: 31. In an embodiment, the epitope comprises nine or more residues at positions 1-12 of SEQ ID NO: 31. In an embodiment, the epitope comprises ten or more residues at positions 1-12 of SEQ ID NO: 31. In an embodiment, the epitope comprises eleven or more residues at positions 1-12 of SEQ ID NO: 31. In an embodiment, the epitope comprises all twelve amino acid residues at positions 1-12 of SEQ ID NO: 31. In a particular embodiment, the epitope comprises a threonine at position 4 of SEQ ID NO: 31. The amino acid sequence of amino acid residues 1-12 of SEQ ID NO: 31 is SEQ ID NO: 82. In a particular embodiment, the epitope comprises a threonine at position 4 of SEQ ID NO: 22. In some such embodiments, the anti-CCR8 antibody docs not block the binding of CCL1 to CCR8. In an embodiment, the epitope is determined by epitope binning. In an embodiment, the epitope is determined by antibody binding to CCR8 peptide-nanobody complexes. In an embodiment, the epitope is determined by determining binding to a CCR8 peptide expressed in human cells, wherein the peptide comprises an amino acid sequence given by SEQ ID NO: 82. In an embodiment, the epitope is determined by screening antibody binding to CCR8 by phage display. In another embodiment, the present invention provides an antibody or antigen-binding fragment thereof that binds human CCR8 at an epitope wherein the epitope consists of at least one residue at positions 1-12 of SEQ ID NO: 31. In an embodiment, the epitope consists of at least two residues at positions 1-12 of SEQ ID NO: 31. In an embodiment, the epitope consists of at least three residues at positions 1-12 of SEQ ID NO: 31. In an embodiment, the epitope consists of at least four residues at positions 1-12 of SEQ ID NO: 31. In an embodiment, the epitope consists of at least five residues at positions 1-12 of SEQ ID NO: 31. In an embodiment, the epitope consists of six or more residues at positions 1-12 of SEQ ID NO: 31. In an embodiment, the epitope consists of seven or more residues at positions 1-12 of SEQ ID NO: 31. In an embodiment, the epitope consists of eight or more residues at positions 1-12 of SEQ ID NO: 31. In an embodiment, the epitope consists of nine or more residues at positions 1-12 of SEQ ID NO: 31. In an embodiment, the epitope consists of ten or more residues at positions 1-12 of SEQ ID NO: 31. In an embodiment, the epitope consists of eleven or more residues at positions 1-12 of SEQ ID NO: 31. In an embodiment, the epitope consists of all twelve amino acid residues at positions 1-12 of SEQ ID NO: 31. In a particular embodiment, the epitope consists of a threonine at position 4 of SEQ ID NO: 31. The amino acid sequence of amino acid residues 1-12 of SEQ ID NO: 31 is SEQ ID NO: 82. In a particular embodiment, the epitope consists of a threonine at position 4 of SEQ ID NO: 22. In some such embodiments, the anti-CCR8 antibody does not block the binding of CCL1 to CCR8. In an embodiment, the epitope is determined by epitope binning. In an embodiment, the epitope is determined by antibody binding to CCR8 peptide-nanobody complexes. In an embodiment, the epitope is determined by screening antibody binding to CCR8 by phage display. In an embodiment, the epitope is determined by determining binding to a CCR8 peptide expressed in human cells, wherein the peptide comprises an amino acid sequence given by SEQ ID NO: 82. In some embodiments, the epitope is determined by anti-CCR8 antibody or antigen-binding fragment thereof binding to the T4R mutation in cynomolgus monkey CCR8. In an embodiment, binding to the T4R mutation is determined in a cell based affinity assay, wherein antibody binding to cells expressing cynomolgus monkey CCR8 containing a T4R mutation is compared to antibody binding to cells expressing wild-type cynomolgus monkey CCR8 (comprising a threonine at position four). In some embodiments, an anti-CCR8 antibody or antigen-binding fragment thereof binds threonine at position four if it shows reduced binding to CCR8 comprising a T4R mutation. In particular embodiments, an anti-CCR8 antibody or antigen-binding fragment thereof binds threonine at position four if it shows no detectable binding to CCR8 comprising a T4R mutation. In some embodiments, wild-type cynomolgus monkey CCR8 comprises an amino acid sequence given by SEQ ID NO: 22. In some embodiments, cynomolgus monkey CCR8 comprising a T4R mutation comprises an amino acid sequence given by SEQ ID NO: 556. In an embodiment, the anti-CCR8 antibody or fragment thereof is an antibody.

[0109] In another embodiment, the present invention provides an antibody or antigen-binding fragment thereof that binds human CCR8 at an epitope wherein the epitope comprises at least one residue of SEQ ID NO: 82. In an embodiment, the epitope comprises at least two residues of SEQ ID NO: 82. In an embodiment, the epitope comprises at least three residues of SEQ ID NO: 82. In an embodiment, the epitope comprises at least four residues of SEQ ID NO: 82. In an embodiment, the epitope comprises at least five residues of SEQ ID NO: 82. In an embodiment, the epitope comprises six or more residues of SEQ ID NO: 82. In an embodiment, the epitope comprises seven or more residues of SEQ ID NO: 82. In an embodiment, the epitope comprises eight or more residues of SEQ ID NO: 82. In an embodiment, the epitope comprises nine or more residues of SEQ ID NO: 82. In an embodiment, the epitope comprises ten or more residues of SEQ ID NO: 82. In an embodiment, the epitope comprises eleven or more residues of SEQ ID NO: 82. In an embodiment, the epitope comprises all twelve amino acid residues of SEQ ID NO: 82. In a particular embodiment, the epitope comprises a threonine at position 4 of SEQ ID NO: 82. In a particular embodiment, the epitope comprises a threonine at position 4 of SEQ ID NO: 22. In some such embodiments, the anti-CCR8 antibody does not block the binding of CCL1 to CCR8. In an embodiment, the epitope is determined by epitope binning. In an embodiment, the epitope is determined by antibody binding to CCR8 peptide-nanobody complexes. In an embodiment, the epitope is determined by screening antibody binding to CCR8 by phage display. In an embodiment, the epitope is determined by determining binding to a CCR8 peptide expressed in human cells, wherein the peptide comprises an amino acid sequence given by SEQ ID NO: 82. In some embodiments, the epitope is determined by anti-CCR8 antibody or antigen-binding fragment thereof binding to the T4R mutation in cynomolgus monkey CCR8. In an embodiment, binding to the T4R mutation is determined in a cell based affinity assay, wherein antibody binding to cells expressing cynomolgus monkey CCR8 containing a T4R mutation is compared to antibody binding to cells expressing wild-type cynomolgus monkey CCR8 (comprising a threonine at position four). In some embodiments, an anti-CCR8 antibody or antigen-binding fragment thereof binds threonine at position four if it shows reduced binding to CCR8 comprising a T4R mutation. In particular embodiments, an anti-CCR8 antibody or antigen-binding fragment thereof binds threonine at position four if it shows no detectable binding to CCR8 comprising a T4R mutation. In some embodiments, wild-type cynomolgus monkey CCR8 comprises an amino acid sequence given by SEQ ID NO: 22. In some embodiments, cynomolgus monkey CCR8 comprising a T4R mutation comprises an amino acid sequence given by SEQ ID NO: 556. In an embodiment, the anti-CCR8 antibody or fragment thereof is an antibody.

[0110] In another embodiment, the present invention provides an antibody or antigen-binding fragment thereof that binds human CCR8 at an epitope wherein the epitope consists of at least one residue of SEQ ID NO: 82. In an embodiment, the epitope consists of at least two residues of SEQ ID NO: 82. In an embodiment, the epitope consists of at least three residues of SEQ ID NO: 82. In an embodiment, the epitope consists of at least four residues of SEQ ID NO: 82. In an embodiment, the epitope consists of at least five residues of SEQ ID NO: 82. In an embodiment, the epitope consists of six or more residues of SEQ ID NO: 82. In an embodiment, the epitope consists of seven or more residues of SEQ ID NO: 82. In an embodiment, the epitope consists of eight or more residues of SEQ ID NO: 82. In an embodiment, the epitope consists of nine or more residues of SEQ ID NO: 82. In an embodiment, the epitope consists of ten or more residues of SEQ ID NO: 82. In an embodiment, the epitope consists of eleven or more residues of SEQ ID NO: 82. In an embodiment, the epitope consists of all twelve amino acid residues of SEQ ID NO: 82. In a particular embodiment, the epitope consists of a threonine at position 4 of SEQ ID NO: 82. In a particular embodiment, the epitope consists of a threonine at position 4 of SEQ ID NO: 22. In some such embodiments, the anti-CCR8 antibody does not block the binding of CCL1 to CCR8. In an embodiment, the epitope is determined by epitope binning. In an embodiment, the epitope is determined by antibody binding to CCR8 peptide-nanobody complexes. In an embodiment, the epitope is determined by screening antibody binding to CCR8 by phage display. In an embodiment, the epitope is determined by determining binding to a CCR8 peptide expressed in human cells, wherein the peptide comprises an amino acid sequence given by SEQ ID NO: 82. In some embodiments, the epitope is determined by anti-CCR8 antibody or antigen-binding fragment thereof binding to the T4R mutation in cynomolgus monkey CCR8. In an embodiment, binding to the T4R mutation is determined in a cell based affinity assay, wherein antibody binding to cells expressing cynomolgus monkey CCR8 containing a T4R mutation is compared to antibody binding to cells expressing wild-type cynomolgus monkey CCR8 (comprising a threonine at position four). In some embodiments, an anti-CCR8 antibody or antigen-binding fragment thereof binds threonine at position four if it shows reduced binding to CCR8 comprising a T4R mutation. In particular embodiments, an anti-CCR8 antibody or antigen-binding fragment thereof binds threonine at position four if it shows no detectable binding to CCR8 comprising a T4R mutation. In some embodiments, wild-type cynomolgus monkey CCR8 comprises an amino acid sequence given by SEQ ID NO: 22. In some embodiments, cynomolgus monkey CCR8 comprising a T4R mutation comprises an amino acid sequence given by SEQ ID NO: 556. In an embodiment, the anti-CCR8 antibody or fragment thereof is an antibody.

[0111] In some embodiments, an anti-CCR8 antibody or fragment thereof of the present invention does not bind an epitope comprising amino acids of SEQ ID NO: 83. In some embodiments, an anti-CCR8 antibody or fragment thereof of the present invention does not bind an epitope comprising amino acids of SEQ ID NO: 86. In some embodiments, an anti-CCR8 antibody or fragment thereof of the present invention does not bind an epitope comprising amino acids of SEQ ID NO: 84. In some embodiments, the epitope is determined by antibody binding to a peptide of amino acids of SEQ ID NO: 85, SEQ ID NO: 83, SEQ ID NO: 86, and/or SEQ ID NO: 84. In some embodiments, an anti-CCR8 antibody or fragment thereof of the present invention does not bind an epitope comprising amino acids at positions 13 through 35 of SEQ ID NO: 31. In some embodiments, an anti-CCR8 antibody or fragment thereof of the present invention does not bind an epitope comprising amino acids at positions 13, 14, or 15 of SEQ ID NO: 31.

[0112] In some embodiments, an anti-CCR8 antibody or fragment thereof of the present invention does not bind an epitope consisting of amino acids of SEQ ID NO: 83. In some embodiments, an anti-CCR8 antibody or fragment thereof of the present invention does not bind an epitope consisting of amino acids of SEQ ID NO: 86. In some embodiments, an anti-CCR8 antibody or fragment thereof of the present invention does not bind an epitope consisting of amino acids of SEQ ID NO: 84. In some embodiments, the epitope is determined by antibody binding to a peptide of amino acids of SEQ ID NO: 85, SEQ ID NO: 83, SEQ ID NO: 86, and/or SEQ ID NO: 84. In some embodiments, an anti-CCR8 antibody or fragment thereof of the present invention does not bind an epitope consisting of amino acids at positions 13 through 35 of SEQ ID NO: 31. In some embodiments, an anti-CCR8 antibody or fragment thereof of the present invention does not bind an epitope consisting of amino acids at positions 13, 14, or 15 of SEQ ID NO: 31

[0113] In some embodiments, an anti-CCR8 antibody or fragment thereof of the present invention does not bind an epitope comprising amino acids residues at position 13-24 of SEQ ID NO: 31. In some embodiments, an anti-CCR8 antibody or fragment thereof of the present invention does not bind an epitope comprising amino acids residues at position 19-30 of SEQ ID NO: 31. In some embodiments, an anti-CCR8 antibody or fragment thereof of the present invention does not bind an epitope comprising amino acids residues at position 25-35 of SEQ ID NO: 31. In some embodiments, the epitope is determined by antibody binding to a peptide of amino acids of SEQ ID NO: 85, SEQ ID NO: 83, SEQ ID NO: 86, and/or SEQ ID NO: 84.

[0114] In some embodiments, an anti-CCR8 antibody or fragment thereof of the present invention does not bind an epitope consisting of amino acids residues at position 13-24 of SEQ ID NO: 31. In some embodiments, an anti-CCR8 antibody or fragment thereof of the present invention does not bind an epitope consisting of amino acids residues at position 19-30 of SEQ ID NO: 31. In some embodiments, an anti-CCR8 antibody or fragment thereof of the present invention does not bind an epitope consisting of amino acids residues at position 25-35 of SEQ ID NO: 31. In some embodiments, the epitope is determined by antibody binding to a peptide of amino acids of SEQ ID NO: 85, SEQ ID NO: 83, SEQ ID NO: 86, and/or SEQ ID NO: 84.

[0115] The term “epitope” as used herein refers to sites of an antigen that are in contact with the variable region of an antibody. The epitope may be continuous or non-continuous, and may be determined by a method known to a person of ordinary skill, including flow cytometry of bound antibody to peptides, hydrogen-deuterium exchange, alanine scanning, and/or x-ray crystallography.

[0116] The epitope may be an epitope comprising or consisting of amino acid residues that are determined by antibody binding to a peptide as described herein. In some such embodiments, the peptide comprises an amino acid sequence of SEQ ID NO: 82. In some such embodiments, the peptide comprises an amino acid sequence of residues at positions 1-12 of SEQ ID NO: 31.

[0117] The epitope may be an epitope comprising or consisting of amino acid residues that are determined by epitope binning. In some such embodiments, the epitope binning is performed with biotinylated N-terminus CCR8 peptides.

[0118] The epitope may be an epitope comprising or consisting of amino acid residues that are determined by antibody binding to CCR8 peptide-nanobody complexes.

[0119] The epitope may be an epitope comprising or consisting of amino acid residues that are determined by screening antibody binding to CCR8 by phage display.

[0120] The epitope may be an epitope comprising or consisting of threonine at position four of the N-terminal region of CCR8 as determined by reduced binding to CCR8 comprising a T4R mutation compared to binding to wild-type CCR8. Binding to the T4R mutation may be tested, for example, by determining binding to wild-type cynomolgus monkey CCR8 (comprising an amino acid sequence given by SEQ ID NO: 22) compared to binding cynomolgus monkey CCR8 comprising a T4R mutation (comprising an amino acid sequence given by SEQ ID NO: 556).

[0121] The epitope may be an epitope comprising or consisting of amino acid residues that are determined by determining binding to a CCR8 peptide expressed in human cells, wherein the peptide comprises an amino acid sequence given by SEQ ID NO: 82. The CCR8 peptide may be fused to a nanobody, or other protein or Fc, for expression in human cells.

[0122] The present invention further provides an antibody or antigen-binding fragment that binds to an epitope on human CCR8, wherein said epitope comprises or consists of SEQ ID NO: 82. In some embodiments, the present invention also provides an antibody or antigen-binding fragment, wherein said antibody or antigen-binding fragment: (a) binds to an epitope on human CCR8, wherein said epitope comprises or consists of SEQ ID NO: 82; and (b) does not block the binding of CCL1 to CCR8. In an embodiment, the antibody or antigen-binding fragment thereof, is an antibody.

[0123] In some embodiments, the present invention provides a molecule that competes for binding to CCR8 with an anti-CCR8 antibody or antigen-binding fragment of the present invention. Such molecule that competes for binding may be, for example, an antibody, antibody fragment, or polypeptide. In some embodiments, the present invention provides a molecule that binds the same epitope as an anti-CCR8 antibody or antigen-binding fragment of the present invention. In an embodiment, the anti-CCR8 antibody or antigen-binding fragment thereof, is an antibody.

[0124] The present invention provides a method of treating cancer in a patient comprising administering to the patient an effective amount of an antibody or antigen-binding fragment that binds human CCR8 at an epitope wherein the epitope comprises at least one residue at positions 1-12 of SEQ ID NO: 31. In an embodiment, the epitope comprises at least two residues at positions 1-12 of SEQ ID NO: 31. In an embodiment, the epitope comprises at least three residues at positions 1-12 of SEQ ID NO: 31. In an embodiment, the epitope comprises at least four residues at positions 1-12 of SEQ ID NO: 31. In an embodiment, the epitope comprises at least five residues at positions 1-12 of SEQ ID NO: 31. In an embodiment, the epitope comprises six or more residues at positions 1-12 of SEQ ID NO: 31. In an embodiment, the epitope comprises seven or more residues at positions 1-12 of SEQ ID NO: 31. In an embodiment, the epitope comprises eight or more residues at positions 1-12 of SEQ ID NO: 31. In an embodiment, the epitope comprises nine or more residues at positions 1-12 of SEQ ID NO: 31. In an embodiment, the epitope comprises ten or more residues at positions 1-12 of SEQ ID NO: 31. In an embodiment, the epitope comprises eleven or more residues at positions 1-12 of SEQ ID NO: 31. In an embodiment, the epitope comprises all twelve amino acid residues at positions 1-12 of SEQ ID NO: 31. In a particular embodiment, the epitope comprises a threonine at position 4 of SEQ ID NO: 31. The amino acid sequence of amino acid residues 1-12 of SEQ ID NO: 31 is SEQ ID NO: 82. In a particular embodiment, the epitope comprises a threonine at position 4 of SEQ ID NO: 22. In some such embodiments, the anti-CCR8 antibody or antigen-binding fragment does not block the binding of CCL1 to CCR8. In an embodiment, the antibody or antigen-binding fragment thereof, is an antibody.

[0125] The present invention provides a method of treating cancer in a patient comprising administering to the patient an effective amount of an antibody or antigen-binding fragment that binds human CCR8 at an epitope wherein the epitope consists of at least one residue at positions 1-12 of SEQ ID NO: 31. In an embodiment, the epitope consists of at least two residues at positions 1-12 of SEQ ID NO: 31. In an embodiment, the epitope consists of at least three residues at positions 1-12 of SEQ ID NO: 31. In an embodiment, the epitope consists of at least four residues at positions 1-12 of SEQ ID NO: 31. In an embodiment, the epitope consists of at least five residues at positions 1-12 of SEQ ID NO: 31. In an embodiment, the epitope consists of six or more residues at positions 1-12 of SEQ ID NO: 31. In an embodiment, the epitope consists of seven or more residues at positions 1-12 of SEQ ID NO: 31. In an embodiment, the epitope consists of eight or more residues at positions 1-12 of SEQ ID NO: 31. In an embodiment, the epitope consists of nine or more residues at positions 1-12 of SEQ ID NO: 31. In an embodiment, the epitope consists of ten or more residues at positions 1-12 of SEQ ID NO: 31. In an embodiment, the epitope consists of eleven or more residues at positions 1-12 of SEQ ID NO: 31. In an embodiment, the epitope consists of all twelve amino acid residues at positions 1-12 of SEQ ID NO: 31. In a particular embodiment, the epitope consists of a threonine at position 4 of SEQ ID NO: 31. The amino acid sequence of amino acid residues 1-12 of SEQ ID NO: 31 is SEQ ID NO: 82. In a particular embodiment, the epitope consists of a threonine at position 4 of SEQ ID NO: 22. In some such embodiments, the anti-CCR8 antibody or antigen-binding fragment does not block the binding of CCL1 to CCR8. In an embodiment, the antibody or antigen-binding fragment thereof, is an antibody.

[0126] The present invention provides a method of treating cancer in a patient comprising administering to the patient an effective amount of an antibody or antigen-binding fragment that binds human CCR8 at an epitope wherein the epitope comprises at least one residue of SEQ ID NO: 82. In an embodiment, the epitope comprises at least two residues of SEQ ID NO: 82. In an embodiment, the epitope comprises at least three residues of SEQ ID NO: 82. In an embodiment, the epitope comprises at least four residues of SEQ ID NO: 82. In an embodiment, the epitope comprises at least five residues of SEQ ID NO: 82. In an embodiment, the epitope comprises six or more residues of SEQ ID NO: 82. In an embodiment, the epitope comprises seven or more residues of SEQ ID NO: 82. In an embodiment, the epitope comprises eight or more residues of SEQ ID NO: 82. In an embodiment, the epitope comprises nine or more residues of SEQ ID NO: 82. In an embodiment, the epitope comprises ten or more residues of SEQ ID NO: 82. In an embodiment, the epitope comprises eleven or more residues of SEQ ID NO: 82. In an embodiment, the epitope comprises all twelve amino acid residues of SEQ ID NO: 82. In a particular embodiment, the epitope comprises a threonine at position 4 of SEQ ID NO: 82. In a particular embodiment, the epitope comprises a threonine at position 4 of SEQ ID NO: 22. In some such embodiments, the anti-CCR8 antibody or antigen-binding fragment does not block the binding of CCL1 to CCR8. In an embodiment, the antibody or antigen-binding fragment thereof, is an antibody.

[0127] The present invention provides a method of treating cancer in a patient comprising administering to the patient an effective amount of an antibody or antigen-binding fragment that binds human CCR8 at an epitope wherein the epitope consists of at least one residue of SEQ ID NO: 82. In an embodiment, the epitope consists of at least two residues of SEQ ID NO: 82. In an embodiment, the epitope consists of at least three residues of SEQ ID NO: 82. In an embodiment, the epitope consists of at least four residues of SEQ ID NO: 82. In an embodiment, the epitope consists of at least five residues of SEQ ID NO: 82. In an embodiment, the epitope consists of six or more residues of SEQ ID NO: 82. In an embodiment, the epitope consists of seven or more residues of SEQ ID NO: 82. In an embodiment, the epitope consists of eight or more residues of SEQ ID NO: 82. In an embodiment, the epitope consists of nine or more residues of SEQ ID NO: 82. In an embodiment, the epitope consists of ten or more residues of SEQ ID NO: 82. In an embodiment, the epitope consists of eleven or more residues of SEQ ID NO: 82. In an embodiment, the epitope consists of all twelve amino acid residues of SEQ ID NO: 82. In a particular embodiment, the epitope consists of a threonine at position 4 of SEQ ID NO: 82. In a particular embodiment, the epitope consists of a threonine at position 4 of SEQ ID NO: 22. In some such embodiments, the anti-CCR8 antibody or antigen-binding fragment does not block the binding of CCL1 to CCR8. In an embodiment, the antibody or antigen-binding fragment thereof, is an antibody.

[0128] In some embodiments, the present invention provides a method of treating cancer in a patient comprising administering to the patient an effective amount of a molecule that competes for binding to CCR8 with an anti-CCR8 antibody or antigen-binding fragment of the present invention. Such molecule that competes for binding may be, for example, an antibody, antibody fragment, or polypeptide. In some embodiments, the present invention provides a molecule that binds the same epitope as an anti-CCR8 antibody of the present invention. In an embodiment, the anti-CCR8 antibody or antigen-binding fragment thereof, is an antibody.

[0129] In some embodiments, an anti-CCR8 antibody or antigen-binding fragment of the present invention binds CCR8 from a non-human species. In some embodiments, an anti-CCR8 antibody or antigen-binding fragment of the present invention binds cynomolgus monkey CCR8. In some embodiments, an anti-CCR8 antibody or antigen-binding fragment of the present invention binds murine CCR8. In some embodiments, the anti-CCR8 antibody or antigen-binding fragment of the present invention binds both cynomolgus monkey CCR8 and human CCR8. In a particular embodiment, an anti-CCR8 antibody or antigen-binding fragment of the present invention bind cynomolgus monkey CCR8 and human CCR8 with affinities that are within 10-fold of one another. In an embodiment, the antibody or antigen-binding fragment thereof, is an antibody.

### BRIEF DESCRIPTION OF THE DRAWINGS

[0130] FIG. 1. Anti-tumor activity of single agent muCLDN18.2 bispecific T-cell engager molecule (BiTER) molecule (□), muCLDN18.2 BITE molecule/anti-CTLA4 dual combination (Δ), muCLDN18.2 BITE molecule/anti-PD-1/anti-4-1BB triple combination (⋄), control BiTE molecule/anti-PD-1/anti-4-1BB/anti-CTLA4 quadruple combination (▪), or muCLDN18.2 BITE molecule/anti-PD-1/anti-4-1BB/anti-CTLA4 quadruple combination (▾) therapy in the KPC-M5 model.

[0131] FIGS. 2A-2C. Anti-tumor activity of CCR8 afucosylated mIgG2a antibody in an MC38 syngeneic mouse model. Individual tumor growth for isotype control mIgG2a antibody (dashed lines) or CCR8 afucosylated mIgG2a antibody (solid lines) are shown in FIGS. 2C and 2B, respectively. FIG. 2A demonstrates the mean tumor volume for each group through day 24. **** indicates p<0.0001.

[0132] FIG. 3. Percent survival of mice inoculated with MC38 tumor cells and treated with either isotype control mIgG2a antibody (dashed lines) or CCR8 afucosylated mIgG2a antibody (solid lines). **** indicates p<0.0001.

[0133] FIGS. 4A-4D. CD8+/Treg ratio in MC38 tumor-bearing mice treated with either isotype control mIgG2a antibody (⋄) or CCR8 afucosylated mIgG2a antibody (•). FIGS. 4A, 4B, 4C, and 4D represent % Foxp3+ Treg, % CD25+Foxp3+Treg, CD8/Treg (Foxp3+), and CD8/Treg (CD25+Foxp3+), respectively.

[0134] FIGS. 5A-5D. Anti-tumor activity of CCR8 afucosylated mIgG2a as monotherapy and in combination with TAA-BiTE molecule in the B16F10 syngeneic tumor model expressing tumor-associated antigen (TAA). Individual tumor growth for the treatment groups is depicted as spider plots (FIGS. 5A to 5D). Animals with no measurable tumors defined as Complete Responders (CRs) have been assessed until day 48.

### DETAILED DESCRIPTION

[0135] The present disclosure provides anti-CCR8 antibodies and methods of making and using said antibodies. The anti-CCR8 antibodies disclosed herein 1) are able to bind human and cynomolgus monkey CCR8 on tumor-resident Treg cells; 2) lead to specific depletion of tumor-resident Treg cells; 3) demonstrate an acceptable pharmacokinetic profile, and/or 4) display sufficient potency for the treatment of cancer. Anti-CCR8 antibodies of the present invention have an improved safety profile compared to other Treg-depleting therapeutic molecules targeting other markers that do not specifically deplete tumor-resident Tregs. In addition, anti-CCR8 depleting antibody treatment resulted in significantly increased CD8+/Treg ratios in tumors, thereby driving enhanced anti-tumor immunity.

[0136] The present invention includes anti-CCR8 antibodies that bind a unique epitope on CCR8 and do not block ligand binding to CCR8, and are therefore not neutralizing antibodies. Binding to this unique epitope, compared to antibodies that bind a different epitope, is thought to contribute to high affinity and bioactivity of the anti-CCR8 antibody, and also an acceptable pharmacokinetic profile.

[0137] In the presence of ligand (CCL1), the anti-CCR8 antibodies of the present invention, that bind a unique epitope on CCR8 and do not block ligand binding, demonstrate ADCC activity even at the highest concentrations of ligand tested in vitro. In contrast, anti-CCR8 antibodies that bind a different epitope (and block ligand binding) demonstrate reduced ADCC activity in the presence of increased levels of CCL1. Therefore, binding to this unique epitope is thought to contribute to greater potency (via ADCC) of the anti-CCR8 antibodies of the present invention, even in the presence of increased concentration of ligand. As CCL1 is highly expressed in tumors such as breast cancer (see e.g., Kuehnemuth et al., BMC Cancer 18, Article number: 1278 (2018)), anti-CCR8 antibodies that demonstrate ADCC activity in the presence of increased concentrations of ligand are preferred.

[0138] Anti-CCR8 antibodies of the present invention are preferably afucosylated and demonstrate enhanced ADCC activity.

[0139] Additional modes of action for depletion of Tregs contemplated by the anti-CCR8 antibodies or fragments thereof of the present invention include antibody-dependent cellular phagocytosis (ADCP) and/or complement-dependent cytotoxicity (CDC).

[0140] As used herein, an “antibody” is an immunoglobulin molecule comprising 2 heavy chains (HCs) and 2 light chains (LCs) interconnected by disulfide bonds. The amino terminal portion of each LC and HC includes a variable region of about 100-120 amino acids primarily responsible for antigen recognition via the CDRs contained therein. The CDRs are interspersed with regions that are more conserved, termed framework regions (“FR”). Each light chain variable region (LCVR) and heavy chain variable region (HCVR) is composed of 3 CDRs and 4 FRs, arranged from amino-terminus to carboxy-terminus in the following order: FR1, CDR1, FR2, CDR2, FR3, CDR3, FR4. The 3 CDRs of the LC are referred to as “LCDR1, LCDR2, and LCDR3,” and the 3 CDRs of the HC are referred to as “HCDR1, HCDR2, and HCDR3.” The CDRs contain most of the residues which form specific interactions with the antigen. The functional ability of an antibody to bind a particular antigen is, thus, largely influenced by the amino acid residues within the six CDRs. Assignment of amino acids to CDR domains within the LCVR and HCVR regions of the antibodies of the present invention is based on the well-known Kabat numbering convention (Kabat, et al., Ann. NY Acad. Sci. 190:382-93 (1971); Kabat et al., Sequences of Proteins of Immunological Interest, Fifth Edition, U.S. Department of Health and Human Services, NIH Publication No. 91-3242 (1991)). It is understood that other numbering conventions may also be used, such as, for example, Chothia (Chothia et al., “Canonical structures for the hypervariable regions of immunoglobulins”, Journal of Molecular Biology, 196, 901-917 (1987); Al-Lazikani et al., “Standard conformations for the canonical structures of immunoglobulins”, Journal of Molecular Biology, 273, 927-948 (1997)), and/or North (North et al., “A New Clustering of Antibody CDR Loop Conformations”, Journal of Molecular Biology, 406, 228-256 (2011)). An “anti-CCR8 antibody” is an antibody that binds CCR8.

[0141] Antibodies of the present invention may be an IgG1, IgG2, or IgG4. Preferably, antibodies of the present invention are IgG1. IgG1 antibodies are known to trigger ADCC. The antibodies of the present invention may be human or humanized antibodies. In the context of monoclonal antibodies, the terms “human” and “humanized” are well-known to those of ordinary skill in the art (Weiner L J, J. Immunother. 2006; 29:1-9; Mallbris L, et al., J. Clin. Aesthet. Dermatol. 2016; 9:13-15).

[0142] In addition, antibodies of the present invention are preferably afucosylated. Removal of the core fucose from the biantennary complex-type oligosaccharides attached to the Fc greatly increased ADCC effector function without altering antigen binding or CDC effector function. Several ways are known for reducing or abolishing fucosylation of Fc-containing molecules, e.g., antibodies. These include recombinant expression in certain mammalian cell lines including a FUT8 knockout cell line, variant CHO line Lec13, rat hybridoma cell line YB2/0, a cell line comprising a small interfering RNA specifically against the FUT8 gene, and a cell line co-expressing α-1,4-N-acetylglucosaminyltransferase III and Golgi α-mannosidase II. Alternatively, the Fc-containing molecule may be expressed in a non-mammalian cell such as a plant cell, yeast, or prokaryotic cell, e.g., E. coli. Zinc-finger nucleases are another known method of generating afucosylated antibodies. Sec e.g., Haryadi et al., Bioengineered 4:2, 90-94; March/April 2013; Ripka et al. Arch. Biochem. Biophys. 249:533-545 (1986); Yamane-Ohnuki et al. Biotech. Bioeng. 87:614 (2004); Pereira et al. mAbs 2018 July; 10 (5): 693-711.

[0143] The anti-CCR8 antibodies or fragments thereof are also contemplated to be in formats including scFv, scFab, Fab, bispecific T-cell engager molecules, and bispecific antibodies (which binds two different epitopes on the same antigen or binds two different antigens).

[0144] An scFv or Fab can be converted into an antibody by known methods (see e.g. Reader et al., Molec. Bio. 61, 801-815 (2019)). Constant region sequences are known in the art. Constant region sequences are also exemplified herein, for example LC and HC constant region amino acid sequences are given by SEQ ID NO: 1079 and SEQ ID NO: 1080, respectively.

[0145] In particular embodiments, the anti-CCR8 antibodies or antigen-binding fragments thereof, of the invention are heterodimeric antibodies (used interchangeably herein with “hetero immunoglobulins” or “hetero Igs”), which refer to antibodies comprising two different light chains and two different heavy chains. In some embodiments, a hetero Ig comprises two Fabs and an Fc region. In some embodiments, the two Fabs are each N-terminal to the Fc region. In some embodiments, the two Fabs are each C-terminal to the Fc region. In some embodiments at least one Fab is an anti-CCR8 antibody fragment of the present invention.

[0146] The heterodimeric antibodies can comprise any immunoglobulin constant region. The term “constant region” as used herein refers to all domains of an antibody other than the variable region. The constant region is not involved directly in binding of an antigen, but exhibits various effector functions. As described above, antibodies are divided into particular isotypes (IgA, IgD, IgE, IgG, and IgM) and subtypes (IgG1, IgG2, IgG3, IgG4, IgA1 IgA2) depending on the amino acid sequence of the constant region of their heavy chains. The light chain constant region can be, for example, a kappa- or lambda-type light chain constant region, e.g., a human kappa- or lambda-type light chain constant region, which are found in all five antibody isotypes.

[0147] The heavy chain constant region of the heterodimeric antibodies can be, for example, an alpha-, delta-, epsilon-, gamma-, or mu-type heavy chain constant region, e.g., a human alpha-, delta-, epsilon-, gamma-, or mu-type heavy chain constant region. In some embodiments, the heterodimeric antibodies comprise a heavy chain constant region from an IgG1, IgG2, IgG3, or IgG4 immunoglobulin.

[0148] An example of a heterodimeric antibody is a Duobody™. Duobodies can be made by the DuoBody™ technology platform (Genmab A/S) as described, e.g., in International Publication Nos. WO 2008/119353, WO 2011/131746, WO 2011/147986, and WO 2013/060867, Labrijn A F et al., PNAS, 110 (13): 5145-5150 (2013), Gramer et al., mAbs, 5 (6): 962-973 (2013), and Labrijn et al., Nature Protocols, 9 (10): 2450-2463 (2014). This technology can be used to combine one half of a first monospecific antibody containing two heavy and two light chains with one half of a second monospecific antibody containing two heavy and two light chains. The resultant heterodimer contains one heavy chain and one light chain from the first antibody paired with one heavy chain and one light chain from the second antibody. When both of the monospecific antibodies recognize different epitopes on different antigens, the resultant heterodimer is a multispecific antibody.

[0149] Another exemplary method of generating multispecific antibodies is by the knobs-into-holes technology (Ridgway et al., Protein Eng., 9:617-621 (1996); WO 2006/028936). The mispairing problem of Ig heavy chains that is a chief drawback for making multispecific antibodies is reduced in this technology by mutating selected amino acids forming the interface of the heavy chains in IgG. At positions within the heavy chain at which the two heavy chains interact directly, an amino acid with a small side chain (hole) is introduced into the sequence of one heavy chain and an amino acid with a large side chain (knob) into the counterpart interacting residue location on the other heavy chain. In some instances, antibodies of the disclosure have immunoglobulin chains in which the heavy chains have been modified by mutating selected amino acids that interact at the interface between two polypeptides so as to preferentially form a multispecific antibody. The multispecific antibodies can be composed of immunoglobulin chains of the same subclass or different subclasses.

[0150] Yet another method of generating multispecific antibodies is the CrossMab technology. CrossMab are chimeric antibodies constituted by the halves of two full-length antibodies. For correct chain pairing, it combines two technologies: (i) the knob-into-hole which favors a correct pairing between the two heavy chains; and (ii) an exchange between the heavy and light chains of one of the two Fabs to introduce an asymmetry which avoids light-chain mispairing. Sec, Ridgway et al., Protein Eng., 9:617-621 (1996); Schaefer et al., PNAS, 108:11187-11192 (2011). CrossMabs can combine two or more antigen-binding domains for targeting two or more targets or for introducing bivalency towards one target such as the 2:1 format.

[0151] Hetero-Ig molecules may also comprise a non-canonical disulfide bond and the generation of an asymmetric cysteine interface, as described in International Publication No. WO 2022/040466 which also discloses specific pairs of mutations that may be used in antibodies of the present invention. To facilitate the association of a particular heavy chain with its cognate light chain, both the heavy and light chains may contain complimentary amino acid substitutions. As used herein, “complimentary amino acid substitutions” refer to a substitution to a positively-charged amino acid in one chain paired with a negatively-charged amino acid substitution in the other chain. For example, the heavy chain comprises at least one amino acid substitution to introduce a charged amino acid and the corresponding light chain comprises at least one amino acid substitution to introduce a charged amino acid, wherein the charged amino acid introduced into the heavy chain has the opposite charge of the amino acid introduced into the light chain. One or more positively-charged residues (e.g., lysine, histidine or arginine) can be introduced into a first light chain (LC1) and one or more negatively-charged residues (e.g., aspartic acid or glutamic acid) can be introduced into the companion heavy chain (HC1) at the binding interface of LC1/HC1, whereas one or more negatively-charged residues (e.g., aspartic acid or glutamic acid) can be introduced into a second light chain (LC2) and one or more positively-charged residues (e.g., lysine, histidine or arginine) can be introduced into the companion heavy chain (HC2) at the binding interface of LC2/HC2. The electrostatic interactions will direct the LC1 to pair with HC1 and LC2 to pair with HC2, as the opposite charged residues (polarity) at the interface attract. The heavy/light chain pairs having the same charged residues (polarity) at an interface (e.g. LC1/HC2 and LC2/HC1) will repel, resulting in suppression of the unwanted HC/LC pairings.

[0152] In some embodiments, a hetero Ig comprises at least one anti-CCR8 antibody fragment of the present invention. In particular embodiments, the anti-CCR8 antibody fragment is a Fab. In particular embodiments, the anti-CCR8 antibody fragment is a scFab. In particular embodiments, the anti-CCR8 antibody fragment is an scFv. Exemplary anti-CCR8 scFv amino acid sequences include, but are not limited to, any one of SEQ ID NOs: 1093-1124.

[0153] In some embodiments, a hetero Ig comprises an anti-CCR8 antibody fragment of the present invention attached to the hetero Ig. Said anti-CCR8 antibody fragment may be in any format as described herein, including scFv, Fab, or scFab. Such attachment may be via linker C-terminal or N-terminal to the Fc region, or N-terminal or C-terminal to another binding domain (e.g. Fab) in the hetero Ig. In some embodiments, a hetero Ig comprises at least one binding arm that is a single chain comprising an anti-CCR8 antibody fragment of the present invention and a further scFab or scFv.

[0154] The present invention also contemplates T cell engager (“TCE”) molecules comprising an anti-CCR8 antibody fragment of the present invention. Such TCE molecules are preferably single chain TCE molecules. A single-chain TCE molecule having the following orientation: scFv that binds CCR8 (VH, linker, VL), linker, scFv that binds CD3 (VH, linker, VL) is contemplated. In an embodiment, the TCE molecule further comprises a scFc, and has the following orientation: scFv that binds CCR8 (VH, linker, VL), linker, scFv that binds CD3 (VH, linker, VL)-Linker-Fc1 (hinge, CH2, CH3), linker, Fc2 (hinge, CH2, CH3). In some embodiments, the scFv that binds CCR8 is an anti-CCR8 antibody fragment of the present invention.

[0155] The present invention also contemplates a TCE molecule having the following orientation from N-terminus to C-terminus: scFv that binds CCR8 (VH, linker, VL)-Linker-sc Fv that binds CD3 (VH, linker, VL)-Linker-Fc1 (CH2-CH3)-Linker-Fc2 (CH2-CH3). In an embodiment, the TCE molecule binds CCR8 and CD3. The present invention also provides a TCE molecule having the following orientation from N-terminus to C-terminus: sc Fv that binds CCR8 (VL-Linker-VH)-Linker-scFv that binds CD3 (VH-Linker-VL)-Linker-Fc1 (CH2-CH3)-Linker-Fc2 (CH2-CH3). In an embodiment, the TCE molecule binds CCR8 and CD3. In some embodiments, the scFv that binds CCR8 is an anti-CCR8 antibody fragment of the present invention.

[0156] The present invention contemplates a TCE molecule comprising an orientation, from N-terminus to C-terminus, of a scFab that binds CCR8 (VH, CH1, linker, VL, cither Cκ or Cλ), linker, an scFv that binds CD3 (VH, linker, VL). In some embodiments, the scFab that binds CCR8 is an anti-CCR8 antibody fragment of the present invention.

[0157] An scFc is a fusion protein in which a CH2 and CH3 (Fc1) are joined via a linker to another CH2 and CH3 (Fc2) to form a continuous protein chain wherein the linker is long enough to allow the protein chain to fold back on itself.

[0158] A “single-chain antigen-binding fragment” (“scFab”) is a fusion protein in which a VH and CH1 are joined via a linker to a VL and Cκ to form a continuous protein chain wherein the linker is long enough to allow the protein chain to fold back on itself and form a monovalent antigen binding site. The linker may be, for example, a (G4S)6, (G4S)7, or (G4S)8 linker.

[0159] The scFab, scFv, and/or scFc may also have a cysteine clamp. A “cysteine clamp” involves the introduction of a cysteine into a polypeptide domain at a specific location, typically through replacing an existing amino acid at the specific location, so that when in proximity with another polypeptide domain, also having a cysteine introduced at a specific location, a disulfide bond (a “cysteine clamp”) may be formed between the two domains. In certain embodiments, an scFc comprises at least one cysteine clamp that results in a disulfide bond across both CH2 domains. In a further specific embodiment, an scFc comprises at least two cysteine clamps that results in a disulfide bond across both CH2 domains. In other embodiments, a binding construct's VH and VL domains may comprise the cysteine clamp(s) to result in disulfide bond formation between the VH and VL domains. These cysteine clamps will stabilize the VH and VL domains in an antigen-binding configuration.

[0160] A cysteine clamp may be naturally occurring or it may be a result of a molecule engineered to contain cysteines. For example, a scFab may have a natural cysteine clamp between the heavy and light chain constant domains. An scFab may also have a natural cysteine clamp between the heavy and light chain constant domains and an engineered cysteine clamp between cysteines at residue 44 of the heavy chain variable region and residue 100 of the light chain variable region. In addition, an anti-target scFv may also contain a cysteine clamp between cysteines at residue 44 of the heavy chain variable region and residue 100 of the light chain variable region, whereas an anti-CD3 scFv does not contain an engineered cysteine clamp. An scFc may contain hinge cysteine clamps, natural CH2/CH3 cysteine clamps, and/or an engineered CH2 cysteine clamp (intrachain).

[0161] Antigen binding fragments derived from an antibody can be obtained, for example, by proteolytic hydrolysis of the antibody, for example, pepsin or papain digestion of whole antibodies according to conventional methods. By way of example, antibody fragments can be produced by enzymatic cleavage of antibodies with pepsin to provide a 5S fragment termed F(ab′)2. This fragment can be further cleaved using a thiol reducing agent to produce 3.5S Fab′ monovalent fragments. Optionally, the cleavage reaction can be performed using a blocking group for the sulfhydryl groups that result from cleavage of disulfide linkages. As an alternative, an enzymatic cleavage using papain produces two monovalent Fab fragments and an Fc fragment directly. These methods are described, for example, by Goldenberg, U.S. Pat. No. 4,331,647, Nisonoff et al., Arch. Biochem. Biophys. 89:230, 1960; Porter, Biochem. J. 73:119, 1959; Edelman et al., in Methods in Enzymology 1:422 (Academic Press 1967); and by Andrews, S. M. and Titus, J. A. in Current Protocols in Immunology (Coligan J. E., et al., eds), John Wiley & Sons, New York (2003). pages 2.8.1-2.8.10 and 2.10A.1-2.10A.5. Other methods for cleaving antibodies, such as separating heavy chains to form monovalent light-heavy chain fragments (Fd), further cleaving of fragments, or other enzymatic, chemical, or genetic techniques may also be used, so long as the fragments bind to the antigen that is recognized by the intact antibody.

[0162] An antibody fragment may also be any synthetic or genetically engineered protein. For example, antibody fragments include isolated fragments comprising the light chain variable region, “Fv” fragments comprising the variable regions of the heavy and light chains, and recombinant single chain polypeptide molecules in which light and heavy variable regions are connected by a peptide linker (scFv proteins).

[0163] Another form of an antibody fragment is a peptide comprising one or more complementarity determining regions (CDRs) of an antibody. CDRs (also termed “minimal recognition units”, or “hypervariable region”) can be obtained by constructing polynucleotides that encode the CDR of interest. Such polynucleotides are prepared, for example, by using the polymerase chain reaction to synthesize the variable region using mRNA of antibody-producing cells as a template (see, for example, Larrick et al., Methods: A Companion to Methods in Enzymology 2:106, 1991; Courtenay-Luck, “Genetic Manipulation of Monoclonal Antibodies,” in Monoclonal Antibodies: Production, Engineering and Clinical Application, Ritter et al. (eds.), page 166 (Cambridge University Press 1995); and Ward et al., “Genetic Manipulation and Expression of Antibodies,” in Monoclonal Antibodies: Principles and Applications, Birch et al., (eds.), page 137 (Wiley-Liss, Inc. 1995)).

[0164] Antibodies and antigen-binding fragments of the present invention bind human CCR8. Preferably, antigen-binding fragments of the present invention bind human CCR8 at an epitope comprising or consisting of amino acid residues of SEQ ID NO: 82. Particularly, antigen-binding fragments of the present invention bind human CCR8 and do not block ligand binding to CCR8.

[0165] In the most general sense, a T cell engager (“TCE”) molecule as described herein comprises a single chain polypeptide that can bind to two different antigens. A “TCE molecule” may be used interchangeably with a “BiTE molecule”. A BiTE molecule can comprise an scFv or scFab, as long as it is bispecific, meaning that it binds two targets (target antigen (here, CCR8) and CD3) at the same time. A TCE molecule is an antigen-binding molecule. A TCE molecule of the present invention may comprise an scFab that binds a target (e.g. tumor or target antigen; CCR8) and an scFv that binds CD3. Such molecule may have the orientation, from N-terminus to C-terminus: scFab (VH, CH1, linker, VL, either Cκ or Cλ), linker, scFv (VH, linker, VL). Such molecules may alternatively have the orientation, from N-terminus to C-terminus: scFab (VL, either Cκ or Cλ, linker, VH, CH1), linker, scFv (VH, linker, VL). In some embodiments, the scFab binds CCR8. In particular embodiments, the TCE molecule comprises a Cκ. Such TCE molecule may have the following orientation, from N-terminus to C-terminus: scFv that binds CCR8 (VH, linker, VL), linker, scFv that binds CD3 (VH, linker, VL). In some such embodiments, the scFv or scFab that binds CCR8 is an anti-CCR8 antibody fragment of the present invention.

[0166] A TCE molecule of the present invention may also have a half-life extending (HLE) moiety. An HLE moiety may extend the in vivo half-life of the TCE molecules of the present invention. Nonlimiting examples of half-life extending moieties include an Fc polypeptide, a single-chain Fc polypeptide (scFc), albumin, an albumin fragment, a moiety that binds to albumin or to the neonatal Fc receptor (FcRn), a derivative of fibronectin that has been engineered to bind albumin or a fragment thereof, a peptide, a single domain protein fragment, or other polypeptide that can increase serum half-life. In other embodiments, a half-life-extending moiety can be a non-polypeptide molecule such as, for example, polyethylene glycol (PEG). In some embodiments, the HLE is a single-chain Fc (“scFc”).

[0167] “Nucleic acid sequence” is intended to encompass a polymer of DNA or RNA, i.e., a polynucleotide, which can be single-stranded or double-stranded and which can contain non-natural or altered nucleotides. The terms “nucleic acid,” “nucleic acid molecule,” “nucleic acid sequence,” and “polynucleotide” may be used interchangeably herein to refer to a polymeric form of nucleotides of any length, either ribonucleotides (RNA) or deoxyribonucleotides (DNA). These terms refer to the primary structure of the molecule, and thus include double- and single-stranded DNA, and double- and single-stranded RNA. The terms include, as equivalents, analogs of either RNA or DNA made from nucleotide analogs and modified polynucleotides such as, though not limited, to methylated and/or capped polynucleotides.

[0168] A DNA molecule of the present invention is a DNA molecule that comprises a non-naturally occurring polynucleotide sequence encoding a polypeptide having the amino acid sequence of at least one of the polypeptides in an anti-CCR8 antibody of the present invention (e.g., heavy chain, light chain, variable heavy chain, and variable light chain).

[0169] An isolated DNA encoding a HCVR region can be converted to a full-length heavy chain gene by operably linking the HCVR-encoding DNA to another DNA molecule encoding heavy chain constant regions. The sequences of human, as well as other mammalian, heavy chain constant region genes are known in the art. DNA fragments encompassing these regions can be obtained, e.g., by standard PCR amplification.

[0170] An isolated DNA encoding a LCVR region may be converted to a full-length light chain gene by operably linking the LCVR-encoding DNA to another DNA molecule encoding a light chain constant region. The sequences of human, as well as other mammalian, light chain constant region genes are known in the art. DNA fragments encompassing these regions can be obtained by standard PCR amplification. The light chain constant region can be a kappa or lambda constant region. In some embodiments, the light chain constant region is a kappa constant region.

[0171] The term “encoding” or “encodes” refers to a polynucleotide sequence encoding one or more amino acids. The term does not require a start or stop codon. The present invention encompasses nucleic acid molecules encoding anti-CCR8 antibody polypeptide sequences.

[0172] The polynucleotides of the present invention can be expressed in a host cell after the sequences have been operably linked to an expression control sequence. The expression vectors are typically replicable in the host organisms either as episomes or as an integral part of the host chromosomal DNA. Commonly, expression vectors will contain selection markers, e.g., tetracycline, neomycin, and dihydrofolate reductase, to permit detection of those cells transformed with the desired DNA sequences.

[0173] Transformed cells can be cultured under conditions that promote expression of the polypeptide, and the polypeptide recovered by conventional protein purification procedures. Polypeptides contemplated for use herein include substantially homogeneous recombinant mammalian polypeptides substantially free of contaminating endogenous materials. Cells containing the nucleic acid encoding an anti-CCR8 antibody of the present invention also include hybridomas.

[0174] A polynucleotide encoding an amino acid sequence of an anti-CCR8 antibody of the present invention can be any length as appropriate for the desired use or function, and can comprise one or more additional sequences, for example, regulatory sequences, and/or can be part of a larger nucleic acid, for example, a vector. The skilled artisan will appreciate that, due to the degeneracy of the genetic code, each of the polypeptide sequences disclosed herein is encoded by a large number of other nucleic acid sequences. Mutations can also be introduced into a nucleic acid without significantly altering the biological activity of a polypeptide that it encodes. For example, one can make nucleotide substitutions leading to amino acid substitutions at non-essential amino acid residues.

[0175] It will be appreciated that an anti-CCR8 antibody of the present invention may have at least one amino acid substitution, providing that the anti-CCR8 antibody retains the same or better desired binding specificity (e.g., binding to CCR8). Therefore, modifications to the anti-CCR8 antibody are encompassed within the scope of the invention. Such modifications may include amino acid substitutions, which may be conservative or non-conservative that do not destroy the desired binding capability of a binding construct. Conservative amino acid substitutions may encompass non-naturally occurring amino acid residues, which are typically incorporated by chemical peptide synthesis rather than by synthesis in biological systems. These include peptidomimetics and other reversed or inverted forms of amino acid moieties. A conservative amino acid substitution may also involve a substitution of a native amino acid residue with a normative residue such that there is little or no effect on the polarity or charge of the amino acid residue at that position.

[0176] Human CCR8 includes the wild-type human CCR8 sequence and variants and isoforms thereof. The amino acid sequence of human CCR8 comprises the amino acid sequence of SEQ ID NO: 21. The term “variant,” as used herein with respect to a nucleic acid sequence means (i) a portion or fragment of a referenced nucleotide sequence; (ii) the complement of a referenced nucleotide sequence or portion thereof; (iii) a nucleic acid that is substantially identical to a referenced nucleic acid or the complement thereof; or (iv) a nucleic acid that hybridizes under stringent conditions to the referenced nucleic acid, complement thereof, or a sequences substantially identical thereto. With respect to a peptide or polypeptide, the term “variant,” as used herein, refers to a peptide or polypeptide that differs from a reference peptide or polypeptide in amino acid sequence by the insertion, deletion, or conservative substitution of amino acids, but retains at least one biological activity of the reference peptide or polypeptide. Variant can also mean a protein with an amino acid sequence that is substantially identical to a referenced protein with an amino acid sequence that retains at least one biological activity. The term “isoform” may be used herein to refer to a polypeptide or protein variant. Typically, a protein isoform is a member of a set of highly similar proteins that originate from a single gene or gene family and are the result of genetic differences. While some protein isoforms exhibit the same or similar biological functions, some isoforms have unique functions. Isoforms may be generated from alternative splicing, variable promoter usage, or other post-transcriptional modifications of a single gene.

[0177] A variant may be a nucleic acid sequence that is substantially identical over the full length of a full gene sequence or a fragment thereof. The nucleic acid sequence may be 80%, 81%, 82%, 83%, 84%, 85%, 86%, 87%, 88%, 89%, 90%, 91%, 92%, 93%, 94%, 95%, 96%, 97%, 98%, 99%, or 100% identical over the full length of the gene sequence or a fragment thereof. In other embodiments, a variant may be an amino acid sequence that is substantially identical over the full length of the amino acid sequence or fragment thereof. The amino acid sequence may be 80%, 81%, 82%, 83%, 84%, 85%, 86%, 87%, 88%, 89%, 90%, 91%, 92%, 93%, 94%, 95%, 96%, 97%, 98%, 99%, or 100% identical over the full length of the amino acid sequence or a fragment thereof.

[0178] The amino acid sequence of cynomolgus monkey CCR8 comprises the amino acid sequence of SEQ ID NO: 22.

[0179] The antibodies of the present invention can readily be produced in mammalian cells, non-limiting examples of which includes CHO, NSO, HEK293 or COS cells. The host cells are cultured using techniques well known in the art.

[0180] Vectors containing the polynucleotide sequences of interest (e.g., the polynucleotides encoding the polypeptides of the antibody and expression control sequences) can be transferred into the host cell by well-known methods, which vary depending on the type of cellular host. Examples of vectors include, but are not limited to, plasmids, viral vectors, non-episomal mammalian vectors and expression vectors, for example, recombinant expression vectors.

[0181] The recombinant expression vectors of the invention can comprise a nucleic acid of the invention in a form suitable for expression of the nucleic acid in a host cell. The recombinant expression vectors include one or more regulatory sequences, selected on the basis of the host cells to be used for expression, which is operably linked to the nucleic acid sequence to be expressed. Regulatory sequences include those that direct constitutive expression of a nucleotide sequence in many types of host cells (e.g., SV40 early gene enhancer, Rous sarcoma virus promoter and cytomegalovirus promoter), those that direct expression of the nucleotide sequence only in certain host cells (e.g., tissue-specific regulatory sequences, see Voss et al., 1986, Trends Biochem. Sci. 11:287, Maniatis et al., 1987, Science 236:1237, incorporated by reference herein in their entireties), and those that direct inducible expression of a nucleotide sequence in response to particular treatment or condition (e.g., the metallothionin promoter in mammalian cells and the tet-responsive and/or streptomycin responsive promoter in both prokaryotic and eukaryotic systems (see id.). It will be appreciated by those skilled in the art that the design of the expression vector can depend on such factors as the choice of the host cell to be transformed, the level of expression of protein desired, etc. The expression vectors of the invention can be introduced into host cells to thereby produce proteins or peptides, including fusion proteins or peptides, encoded by nucleic acids as described herein.

[0182] Typically, expression vectors used in any of the host cells will contain sequences for plasmid maintenance and for cloning and expression of exogenous nucleotide sequences. Such sequences, collectively referred to as “flanking sequences” in certain embodiments will typically include one or more of the following nucleotide sequences: a promoter, one or more enhancer sequences, an origin of replication, a transcriptional termination sequence, a complete intron sequence containing a donor and acceptor splice site, a sequence encoding a leader sequence for polypeptide secretion, a ribosome binding site, a polyadenylation sequence, a polylinker region for inserting the nucleic acid encoding the polypeptide to be expressed, and a selectable marker element. The leader sequence may comprise an amino acid sequence of SEQ ID NO: 557 (MDMRVPAQLLGLLLLWLRGARC) which is encoded by SEQ ID NO: 558 (atggacatgagagtgcctgcacagctgctgggcctgctgctgctgtggctgagaggcgccagatgc). The leader sequence may comprise an amino acid sequence of SEQ ID NO: 559. (MAWALLLLTLLTQGTGSWA) which is encoded by SEQ ID NO: 560 (atggcctggg ctctgctgct cctcacccte ctcactcagg gcacagggtc ctgggcc). The present invention contemplates antibody protein sequences without leader sequences.

[0183] The present invention also contemplates anti-CCR8 antibodies of the present invention that have clipping of the C-terminal lysine residue of the antibody HC. Anti-CCR8 antibodies comprising an antibody HC amino acid sequence lacking the C-terminal lysine residue are contemplated.

[0184] Various methods of protein purification may be employed to purify proteins, including, but not limited to, antibodies, and such methods are known in the art.

[0185] The anti-CCR8 antibodies of the invention can be biosynthesized, purified, and formulated for administration by well-known methods. For example, an appropriate host cell, such as HEK 293 or CHO, is either transiently or stably transfected with an expression system for secreting antibodies using a predetermined HC:LC vector ratio if two vectors are used, or a single vector system encoding both heavy chain and light chain. Vectors suitable for expression and secretion of antibodies from these commonly-used host cells are well-known. Following expression and secretion of the antibody, the medium is clarified to remove cells and the clarified medium is purified using any of many commonly-used techniques. For example, the medium may be applied to a Protein A or G column that has been equilibrated with a buffer, such as phosphate buffered saline (pH 7.4). The column is washed to remove nonspecific binding components. The bound antibody is eluted, for example, by a pH gradient (such as 0.1 M sodium phosphate buffer pH 6.8 to 0.1 M sodium citrate buffer pH 2.5). Antibody fractions are detected, such as by SDS-PAGE, and then are pooled. Further purification is optional, depending on the intended use. The antibody may be concentrated and/or sterile filtered using common techniques. Other materials than the antibody, such as host cell and growth medium components, and soluble aggregates and multimers of the antibody, may be effectively reduced or removed by common techniques, including size exclusion, hydrophobic interaction, cation exchange, anion exchange, affinity, or hydroxyapatite chromatography. The purity of the antibody after these chromatography steps is typically greater than 95%. The product may be frozen at −70° C. or may be lyophilized.

[0186] In exemplary aspects, an antibody of the present invention comprises a HC comprising a C-terminal lysine, as in SEQ ID NOs: 354, 364, 374, 384, 394, 404, 414, 424, 434, 444, 454, 464, 474, 484, 494, 504, 514, 524, 534, 544, 554, 1127, 1129, 1131, 1134, 1136, 1138, 1140, 1142, 1144, 1146, 1148, 1150, 1152, 1154, 1156, 1158, or 1160. In alternative aspects, the antibody comprises a HC without the C-terminal lysine, as in SEQ ID NOs: 573-592 or SEQ ID NOs: 1238-1254. In addition, the HC N-terminal glutamine and/or the N-terminal glutamic acid of may be converted to pyroglutamic acid. Either form is envisioned for the antibodies of the present invention.

[0187] Similarly, in exemplary aspects, the anti-PD-1 antibody comprises a heavy chain comprising a C-terminal lysine, as in SEQ ID NOs: 41, for example. In alternative aspects, the anti-PD-1 antibody comprises the heavy chain of SEQ ID NOs: 636 without the C-terminal lysine. In other exemplary aspects, the anti-PD-1 antibody comprises a heavy chain comprising a C-terminal lysine. In alternative aspects, the anti-PD-1 antibody comprises a heavy chain without the C-terminal lysine.

[0188] An anti-CCR8 antibody of the present invention, or a pharmaceutical composition comprising the same, may be administered by parenteral routes, non-limiting examples of which are subcutaneous administration and intravenous administration. Intramuscular, intraarterial, intralesional, and peritoneal bolus injection are other possible routes of administration. An anti-CCR8 antibody can also be administered via infusion, for example intravenous or subcutaneous infusion. An anti-CCR8 antibody of the present invention may be administered to a patient with pharmaceutically acceptable carriers, diluents, or excipients in single or multiple doses. Optionally, the composition additionally comprises one or more physiologically active agents. Pharmaceutical compositions of the present invention can be prepared by methods well known in the art (e.g., Remington: The Science and Practice of Pharmacy, 22nd ed. (2012), A. Loyd et al., Pharmaceutical Press) and comprise an antibody, as disclosed herein, and one or more pharmaceutically acceptable carriers, diluents, or excipients.

[0189] As used interchangeably herein, “treatment” and/or “treating” and/or “treat” are intended to refer to all processes wherein there may be a slowing, interrupting, arresting, controlling, stopping, or reversing of the progression of the disorders described herein, but does not necessarily indicate a total elimination of all disorder symptoms. Treatment includes administration of an anti-CCR8 antibody of the present invention for treatment of a disease or condition in a human that would benefit from activity of an anti-CCR8 antibody of the present invention, and includes: (a) inhibiting further progression of the disease; and (b) relieving the disease, i.e., causing regression of the disease or disorder or alleviating symptoms or complications thereof.

[0190] Therapeutically effective amounts (or dose) of an anti-CCR8 antibody of the present invention can be administered. As used herein, an “effective amount” means the amount of an anti-CCR8 antibody of the present invention or pharmaceutical composition comprising such an antibody that will elicit the biological or medical response of or desired therapeutic effect on a tissue, system, animal, mammal, or human that is being sought by the researcher, medical doctor, or other clinician. An effective amount of the antibody may vary according to factors such as the disease state, age, sex, and weight of the individual, and the ability of the antibody to elicit a desired response in the individual. An effective amount is also one in which any toxic or detrimental effect of the antibody is outweighed by the therapeutically beneficial effects. Such benefit includes improving signs or symptoms of cancer. An effective amount of an anti-CCR8 antibody of the present invention may be administered in a single dose or in multiple doses. In determining the effective amount for a patient, a number of factors are considered by the attending medical practitioner, including, but not limited to: the patient's size (e.g., weight or mass), body surface area, age, and general health; the specific disease or disorder involved; the degree of, or involvement, or the severity of the disease or disorder; the response of the individual patient; the particular compound administered; the mode of administration; the bioavailability characteristics of the preparation administered; the dose regimen selected; the use of concomitant medication; and other relevant circumstances known to medical practitioners.

[0191] Dosages, frequency of administration, formulation, and effective amount of an antagonist of the PD-1/PD-L1 pathway, a bispecific T-cell engager molecule, and/or an agonist of an immune cell co-stimulatory receptor can also be determined as described herein.

[0192] Suitable PD-L1 antagonist antibodies for use in methods of the present invention include, but are not limited to, atezolizumab, avelumab, or durvalumab. Examples of PD-1 antagonist antibodies suitable for use in methods of the invention include, but are not limited to pembrolizumab, nivolumab, cemiplimab, pidilizumab, spartalizumab, camrelizumab, sintilimab, tislelizumab, toripalimab, dostarlimab, Antibody 20C1.006, zeluvalimab, Antibody 20A2.003, Antibody 22D4.006, or Antibody 22D4.017, and any of the PD-1 antagonist antibodies described in WO 2019/140196. Such methods include a method of treating cancer in a patient comprising administering an effective amount of an anti-CCR8 antibody of the present invention and a PD-L1 antagonist antibody or PD-1 antagonist antibody. Such methods also include a method of treating cancer in a patient comprising administering to the patient an effective amount of a Treg depleting antibody and one or more of a bispecific T-cell engager molecule, an agonist of a T cell co-stimulatory receptor, and an antagonist of the PD-1/PD-L1 pathway.

[0193] Bispecific T-cell engager molecules are recombinant protein constructs made from two flexibly linked antibody derived binding domains. A “bispecific T-cell engager molecule” may be used interchangeably with a “BiTE® molecule”. One binding domain of bispecific T-cell engager is specific for a selected tumor-associated surface antigen on target cells; the second binding domain is specific for CD3, a subunit of the T cell receptor complex on T cells. By their particular design, bispecific T-cell engager molecules are uniquely suited to transiently connect T cells with target cells and, at the same time, potently activate the inherent cytolytic potential of T cells against target cells (Yang, Fa; Wen, Weihong; Qin, Weijun (2016). “Bispecific Antibodies as a Development Platform for New Concepts and Treatment Strategies”. International Journal of Molecular Sciences. 18 (1): 48 (2016)). A bispecific T-cell engager molecule is bispecific, meaning that it binds two targets (target antigen and CD3) at the same time. Sequences of examples of scFvs that bind CD3 include I2E and I2C and are described in Table 15. Suitable bispecific T-cell engager molecules for use in methods of the present invention include, but are not limited to, the bispecific T-cell engager molecules given in Table 15.

[0194] The CD3 binding domain 12C comprises LCDR1, LCDR2, LCDR3, HCDR1, HCDR2, HCDR3, VH, VL, and VH-VL amino acids sequences of SEQ ID NO: 87-95, respectively. The CD3 binding domain 12E comprises LCDR1, LCDR2, LCDR3, HCDR1, HCDR2, HCDR3, VH, and VL amino acids sequences of SEQ ID NO: 96-103, respectively. An example of a CD33 T cell engager molecule is one that comprises CDR, VH/VL region, and bispecific single chain molecule amino acids sequences of SEQ ID NO: 104-118. An example of an EGFRVIII T cell engager molecule is one that comprises CDR, VH/VL region, and bispecific single chain molecule amino acids sequences of SEQ ID NO: 119-129. An example of a MSLN T cell engager molecule is one that comprises CDR, VH/VL region, and bispecific single chain molecule amino acids sequences of SEQ ID NO: 130-141. An example of a CDH19 T cell engager molecule is one that comprises CDR, VH/VL region, and bispecific single chain molecule amino acids sequences of SEQ ID NO: 142-159. An example of a FLT3 T cell engager molecule is one that comprises CDR, VH/VL region, and bispecific single chain molecule amino acids sequences of SEQ ID NO: 160-170. An example of a DLL3 T cell engager molecule is one that comprises CDR, VH/VL region, and bispecific single chain molecule amino acids sequences of SEQ ID NO: 171-181. An example of a CD19 T cell engager molecule is one that comprises CDR, VH/VL region, and bispecific single chain molecule amino acids sequences of SEQ ID NO: 182-191. An example of a BCMA T cell engager molecule is one that comprises CDR, VH/VL region, and bispecific single chain molecule amino acids sequences of SEQ ID NO: 192-202. An example of a PSMA T cell engager molecule is one that comprises CDR, VH/VL region, and bispecific single chain molecule amino acids sequences of SEQ ID NO: 203-240. An example of a CD70 T cell engager molecule is one that comprises CDR, VH/VL region, and bispecific single chain molecule amino acids sequences of SEQ ID NO: 241-250. An example of a CLDN18.2 T cell engager molecule is one that comprises CDR, VH/VL region, and bispecific single chain molecule amino acids sequences of SEQ ID NO: 251-266. An example of a MUC17 T cell engager molecule is one that comprises CDR, VH/VL region, and bispecific single chain molecule amino acids sequences of SEQ ID NO: 267-302. An example of a CDH3 T cell engager molecule is one that comprises CDR, VH/VL region, and bispecific single chain molecule amino acids sequences of SEQ ID NO: 303-313. An example of a CD19 T cell engager molecule is one that comprises CDR, VH/VL region, and bispecific single chain molecule amino acids sequences of SEQ ID NO: 314-332.

[0195] Methods of the present invention include a method of treating cancer in a patient comprising administering an effective amount of an anti-CCR8 antibody of the present invention and a bispecific T-cell engager molecule. Such methods also include a method of treating cancer in a patient comprising administering to the patient an effective amount of a Treg depleting antibody and one or more of a bispecific T-cell engager molecule, an agonist of a T cell co-stimulatory receptor, and an antagonist of the PD-1/PD-L1 pathway.

[0196] An agonist of an immune cell co-stimulatory receptor is a molecule that binds a co-stimulatory receptor on an immune cell (such as an activated T cell) and promotes activity of the receptor. Examples of co-stimulatory receptors include CD2, TNFRSF4 (OX40), TNFRSF5 (CD40), TNFRSF7 (CD27), TNFRSF8 (CD30), TNFRSF9 (4-1BB), TNFRSF14 (HVEM), TNFRSF18 (GITR), and ICOS.

### EXAMPLES

### Example 1: CCR8 Specificity

[0197] Transfected cells were used to assess an antibody's binding specificity using flow cytometry on host Human Embryonic Kidney (HEK) 293T cells. Proteins were expressed on HEK 293T cells by transfection using human CCR8 (SEQ ID NO: 21), human CCR8 with an A27G point mutation (SEQ ID NO: 23), murine CCR8 (SEQ ID NO: 24), rat CCR8 (SEQ ID NO: 25), human CCR4 (SEQ ID NO: 26), or control expression vectors, Gibco™ Opti-MEM® media (Gibco), and 293Fectin™ reagent (Invitrogen) according to the manufacturer's instructions. Human T-cell lymphoma (HuT78) cell lines were also used to determine specificity to endogenously expressed CCR8.

[0198] Transfected HEK293T cells (24 hours after transfection) or HuT78 cells were resuspended in FACS buffer (PBS+2% Fetal Bovine Serum) and added to a 96-well plate. Hybridoma supernatant samples containing control antibodies 433H (BD Biosciences) or L263G8 (BioLegend), Antibody 1 IgG2, or Antibody 2 IgG2 were added at a final concentration of 5.0 μg/mL, cells were resuspended and incubated for 1 hour at 4° C. Plates were washed twice with FACS buffer, centrifuged to pellet the cells, and supernatant was removed and resuspended in FACS buffer to remove unbound antibodies.

[0199] Alexa Fluor 647 goat anti-human or rat IgG (Fcγ fragment specific) secondary antibodies (Jackson ImmunoResearch) made up in FACS buffer at 5.0 μg/mL were added to each well, and cells were resuspended and incubated for 15 minutes at 4° C. Plates were washed twice with FACS buffer, centrifuged to pellet the cells, and supernatant was removed and resuspended in FACS buffer to remove unbound secondary antibodies. Samples were resuspended in FACS buffer and read on either IntelliCyt® iQue or BD Accuri™ Flow Cytometer with an Intellicyt HyperCyt autosampler. Data derived from three cohorts of immunized animals are represented in Table 2.

TABLE 2
Binding of hybridoma supernatants (final Ab concentration at 5 μg/ml) to native
conformation of CCR8 expressed on surface of cells as determined by FACS analysis.

| | Human CCR8 | | Rat CCR8 | Mouse CCR8 |
|---|---|---|---|---|
| Antibody | [A27G] transiently | | transiently | transiently |
| Hybridoma | expressed on | HUT78 (endogenous | expressed on | expressed on |
| Supernatant | HEK293T | human CCR8) | HEK293T | HEK293T |
| Antibody 1 IgG2 | 36924 | 7756.9 | 105325 | 24729 |
| Antibody 2 IgG2 | 24205 | 1466.0 | 11023 | 3597 |
| L263G8 | 41425 | 4500 | N.D. | N.D. |
| SA214G2 | N.D. | N.D. | 1594 | 56829 |

[0200] These data demonstrate that hybridoma supernatant containing Antibody 1 IgG2 or Antibody 2 IgG2 bound human CCR8, including human CCR8 with the A27G mutation, rat, and mouse CCR8. None of the tested antibodies in supernatant bound to human CCR4 or 293T cells transfected with a control expression vector.

### Example 2: Antibody Binding to Human and Cynomolgus Monkey Regulatory T Cells

[0201] Binding of anti-CCR8 antibodies to endogenous CCR8 expressed by primary human and cynomolgus monkey regulatory T cells (human or cyno T-regs) was assessed by flow cytometry. Freshly isolated human (N=3) and cynomolgus monkey (N=2) peripheral blood mononuclear cells (PBMCs) were incubated with anti-CCR8 hybridoma culture supernatants at 20% final concentration in the presence of human Fc Block for one hour at 4° C. The primary antibodies were washed out from the cells, and the secondary anti-human or anti-rat IgG Fc antibodies and the cocktail of human/cyno cross-reactive anti-CD4/anti-CD25/anti-CD127 antibodies were added and incubated for thirty minutes at 4° C. 200,000 events were collected using FACS Canto flow cytometer, and binding was detected on the CD4+/CD25+/CD127-gated viable cells. The percent positive cells represents the percentage of human or cyno Tregs that were stained by the hybridoma culture supernatant containing the antibody under investigation. Control antibody 433H was purified and used at a concentration of 20 μg/ml. Results are shown in Table 3.

TABLE 3
Binding of hybridoma supernatants to primary
human and cynomolgus monkey regulatory T cells.

| | CCR8+CD127−CD25+CD4, % positive | | | | |
|---|---|---|---|---|---|
| | | | | Cynomolgus Monkey | |
| Antibody | Human (3 samples) | | | (2 samples) | |
| Antibody 2 IgG2 | 24.4 | 9.4 | 11.9 | 8.5 | 17.9 |
| Antibody 1 IgG2 | 23.3 | Not tested | 32.7 | 9.4 | 17.1 |
| Antibody 3 IgG2 | 55.6 | Not tested | 15.1 | 15.5 | 21.9 |
| Antibody 4 IgG2 | 72.6 | 26.5 | 34.8 | 7.7 | 17.6 |
| Hu IgG2b | 1.5 | 0.0 | 1.9 | 11.9 | 11.3 |
| 433H | 83.4 | 29.4 | 67.5 | 66.2 | 63.7 |
| Cyno IgG2a | 0.0 | 0.1 | 0.0 | 0.3 | 0.8 |

[0202] These data demonstrate that hybridoma supernatants containing antibodies of the present invention bind to endogenously expressed human and cynomolgus CCR8 expressed on primary T-cells.

### Example 3: Epitope Binning

[0203] To enable epitope mapping of the anti-CCR8 antibodies, human CCR8-binding hybridoma supernatants were tested for binding to five biotinylated N-terminus CCR8 peptides generated from the 1-35 amino acid N-terminal portion of CCR8 (SEQ ID NO: 31). Each of the five peptides was twelve amino acids long with six amino acids overlapping. The amino acid sequences of Peptide 1, Peptide 2, Peptide 3, Peptide 4, and Peptide 5 comprise amino acids 1-12 (SEQ ID NO: 82), 7-18 (SEQ ID NO: 85), 13-24 (SEQ ID NO: 83), 19-30 (SEQ ID NO: 86), and 25-35 (SEQ ID NO: 84) of SEQ ID NO. 31, respectively.

[0204] The biotinylated human CCR8 peptides were captured on streptavidin polystyrene beads (Spherotech) in FACS buffer (PBS+2% Fetal Bovine Serum) at a final protein concentration of 50-100 ng/ml and incubated for 30 minutes at room temperature. Beads were washed twice with FACS buffer to remove unbound protein, centrifuged to pellet the beads, and resuspended and pooled together in StabilGuard (SurModics). The pooled biotinylated human CCR8 coated beads were added to hybridoma supernatant samples in a 96-well plate, such that the final antibody concentration was 5.0 μg/mL, and then incubated for one hour at room temperature.

[0205] Plates were washed twice with FACS buffer, centrifuged to pellet the beads, and supernatant was removed and resuspended in FACS buffer to remove unbound antibodies. Alexa Fluor 488 goat anti-human or rat IgG (Fcγ fragment specific) secondary antibodies (Jackson ImmunoResearch) made up in FACS buffer at 5.0 μg/mL were added to each well, resuspended with beads and incubated for 15 minutes at room temperature. Plates were washed twice with FACS buffer, centrifuged to pellet the beads, and supernatant was removed and resuspended in FACS buffer to remove unbound secondary antibodies. Samples were then resuspended in FACS buffer and read on either IntelliCyt® iQue Flow Cytometer.

[0206] Results are shown in Table 4. Data are represented as a ratio of geometric mean binding to beads coated with specific peptide divided by geometric mean of binding to a bead coated with a negative control peptide (peptide with unrelated sequence). A value above two represents presence of binding.

TABLE 4
Binding of hybridoma supernatants to biotinylated peptides
coated on streptavidin beads as determined by FACS.

| | Peptide Antigen Coating: 100 ng/mL | | | | |
|---|---|---|---|---|---|
| | Peptide | Peptide | Peptide | Peptide | Peptide |
| Antibody | 1 | 2 | 3 | 4 | 5 |
| Antibody 2 IgG2 | 0 | 0 | 157 | 1 | 0 |
| Antibody 1 IgG2 | 3 | 0 | 0 | 0 | 1 |
| Antibody 3 IgG2 | 1 | 1 | 83 | 1 | 1 |
| Antibody 4 IgG2 | 1 | 2 | 8 | 2 | 1 |
| Antibody 5 IgG2 | 0 | 0 | 120 | 0 | 0 |
| Antibody 6 IgG2 | 0 | 0 | 154 | 0 | 0 |
| 433H | 1 | 1 | 1 | 1 | 1 |
| L263G8 | 1 | 0 | 0 | 1 | 0 |

[0207] Interestingly, hybridoma supernatants containing Antibody 1 IgG2 bound to the most N-terminal region (1-12), suggesting Antibody 1 IgG2 binds a unique epitope on CCR8, which is thought to contribute to the high affinity and bioactivity of Antibody 1 IgG2.

### Example 4: Epitope Clustering

[0208] The extracellular domain of human CCR8 comprises three loops and a N-terminal peptide of 35 amino acids. For epitope mapping, the N-terminal peptide of human CCR8 (designated P_1-35 (SEQ ID NO: 31)) was divided into three consecutive segments (designated P_1-12 (SEQ ID NO: 82), P_13-24 (SEQ ID NO: 83), and P_25-35 (SEQ ID NO: 84)). To cover the adjacent N- or C-terminal regions of the consecutive segments, two additional overlapping fragments (designated P_7-18 (SEQ ID NO: 85 and P_19-30 (SEQ ID NO: 86)) were made. At the C-terminal end of the full-length N-terminal peptide and all truncated N-terminal peptides of human CCR8 described above, a V5 tag was fused via a G4S-linker. Following the V5 tag, chicken albumin was fused via a further G4S-linker followed by a FLAG tag, BAP (biotin acceptor protein) for in vivo biotinylation, and H3G, each fused via a SG-linker. All constructs described above were cloned into a pEFDHFR vector and transiently transfected into HEK 293 cells.

[0209] HEK 293 cells (1×10⁸) were resuspended in 100 ml FreeStyle expression medium (Gibco 12338-018) and transfected with 4 ml OptiMEM (Gibco 31985-047), 100 μl 293fectin (Invitrogen 12347-019), and 50 μg DNA encoding either the full-length or truncated N-terminal CCR8 constructs according to the manufacturers protocol. Cells were grown in FreeStyle expression medium for 72 hours at 130 rpm in a humidified incubator with 8% CO₂. Cells were centrifuged at 1,500 rpm for 10 minutes and the supernatant was harvested. 10 ml of the supernatant of each of the transfected cells or 9 ml of HEK 293 cells as negative control were 20× concentrated with Amicon Ultra-15 tubes (UFC901008) to 500 μL. For each of the full-length and truncated N-terminal CCR8 constructs, as well as HEK 293 negative control, 18×10⁶ washed streptavidin-beads (Streptavidin Microspheres, 6 μm; Polysciences 24172-1) were resuspended in 500 μL of the concentrated supernatant and incubated slowly shaking for one hour. Beads coupled with the respective antigen or negative control were washed and stored at 4° C. overnight.

[0210] To verify expression and binding of the full-length and truncated N-terminal CCR8 constructs to streptavidin-beads, 2×10⁵ beads per staining were incubated with 5 μg/mL of an anti-FLAG antibody (clone M2, Sigma F3165/F1804), 5 g/mL of an anti-V5 antibody (clone SV5-Pk1; AbD Serotec, MCA 1360), and a 1:100 dilution of PE-labeled anti mouse Fcγ secondary antibody (Jackson 115-116-071). Antigen-bound beads were incubated with three different anti-human CCR8 antibodies. Binding of two of the anti-human CCR8 antibodies (clone L263G8; BioLegend, 360602 and clone 433H; BD 747578; 5 μg/ml each) was detected with a 1:100 dilution of a PE-labeled anti mouse Fcγ secondary antibody (Jackson 115-116-071). Binding of anti-human CCR8 antibody (polyclonal; Abcam, ab 140796) was detected with a 1:50 dilution of PE-labeled anti goat Fcγ secondary antibody (Jackson 109-116-098).

[0211] Binding of CCR8-binding TCE molecules and scFab-containing CCR8-binding TCE molecules to the full-length and truncated N-terminal CCR8 constructs bound to streptavidin-beads was determined. In the most general sense, a T cell engager (“TCE”) molecule comprises a single chain polypeptide that can bind to two different antigens. The term “TCE molecule” may be used interchangeably with the terms “BiTE® molecule” or “bispecific T-cell engager” molecule. Tested TCE molecules included molecules comprising an scFab that binds CCR8 and an scFv binds CD3 (scFab-containing TCE molecules), and molecules comprising an scFv that binds CCR8 and an scFv that binds CD3. The tested TCE molecules also included an scFc at the C-terminus as a half-life extending (HLE) moiety. The CDRs of Antibody 1 antibodies are the same as the CDRs of TCE1 (TCE1 CDR amino acid sequences comprise SEQ ID NOs 561 to 566). The CDRs of Antibody 2 IgG2 are the same as the CDRs of TCE2 (TCE2 CDR amino acid sequences comprise SEQ ID NOs 567 to 572).

[0212] Beads were incubated with 5 μg/mL of the respective TCE molecule. Binding of these CCR8-binding TCE molecules and scFab-containing CCR8-binding TCE molecules was detected using 2 μg/ml of an anti-Histidine-antibody (clone AD1.1.10; AbD Serotec MCA 1396) and a 1:100 dilution of a PE-labeled anti mouse Fcγ secondary antibody (Jackson 115-116-071). All antibodies, CCR8-binding TCE molecules, and scFab-containing CCR8-binding TCE molecules were diluted in PBS with 2% FBS and all incubations were performed at 4° C. for 45 minutes (primary antibodies) or for 30 minutes (secondary antibodies). Washes were performed using PBS with 2% FBS, and the final suspension buffer prior to FACS analysis was also PBS with 2% FBS. Antibody and TCE binding was detected using an Intellicyte IQue. Changes in mean fluorescence were analyzed with an Intellicyte IQue and FlowJo. Binding to the various full-length and truncated N-terminal CCR8 constructs was reflected as a positive signal detected by flow cytometry.

[0213] Expression and binding of the full-length and the various truncated N-terminal CCR8 constructs to streptavidin-beads were verified by flow cytometry, as shown in Tables 5 and 6.

TABLE 5
Flow Cytometry Binding Analysis of CCR8 Antibodies to
Full-length or Truncated N-terminal Peptides of Human CCR8.

| | Peptide or controls | | | | | | | |
|---|---|---|---|---|---|---|---|---|
| | Beads | HEK | | | | | | |
| | (control) | (control) | 1-35 | 1-12 | 7-18 | 13-24 | 19-30 | 25-35 |
| | Median Fluorescence of Sample/Median | | | | | | | |
| Sample | Fluorescence of Negative Control | | | | | | | |
| PBS | 0.9 | 0.9 | 0.9 | 0.9 | 0.9 | 0.9 | 0.9 | 1.9 |
| Flag | 0.9 | 0.9 | 522.0 | 596.0 | 588.7 | 628.1 | 589.5 | 582.0 |
| V5 Tag | 0.9 | 0.9 | 952.6 | 1091.5 | 1085.9 | 1303.2 | 1016.2 | 1094.2 |
| anti-CCR8 | 1.2 | 0.9 | 751.2 | 0.9 | 0.9 | 284.8 | 0.9 | 0.9 |
| (clone L263G8) | | | | | | | | |
| anti-CCR8 | 1.8 | 0.9 | 290.2 | 0.9 | 0.9 | 300.3 | 0.9 | 0.9 |
| (clone BV510) | | | | | | | | |
| anti-CCR8 | 0.9 | 1.0 | 259.7 | 0.9 | 222.6 | 385.6 | 0.9 | 0.9 |
| (polyclonal) | | | | | | | | |

[0214] The data in Table 5 demonstrate that anti-human CCR8 antibodies bound the full-length N-terminal peptide of human CCR8 P_1-35, indicating they recognized the N-terminal peptide of human CCR8. None of the antibodies showed binding to either streptavidin-beads alone or to the HEK 293 control. The anti-human CCR8 antibodies (clone L263G8 and clone 433H) showed the same binding pattern, while the polyclonal anti-human CCR8 antibody showed additional binding to the overlapping fragment P_7-18.

TABLE 6
Flow Cytometry Binding Analysis of CCR8 Antibodies
and scFab-containing CCR8-binding TCE molecules to
Full-length or Truncated N-terminal Peptides of Human CCR8.

| | Peptide or controls | | | | | | | |
|---|---|---|---|---|---|---|---|---|
| | Beads | HEK | | | | | | |
| | (control) | (control) | 1-35 | 1-12 | 7-18 | 13-24 | 19-30 | 25-35 |
| | Median Fluorescence of Sample/Median | | | | | | | |
| Construct | Fluorescence of Negative Control | | | | | | | |
| PBS | 1.0 | 1.0 | 1.0 | 1.0 | 1.0 | 1.0 | 1.0 | 1.0 |
| CCR8 TCE1 | 1.2 | 1.1 | 470.8 | 413.5 | 1.0 | 1.1 | 1.1 | 1.1 |
| scFab × I2E × scFc | | | | | | | | |
| CCR8 TCE1 | 1.1 | 1.0 | 381.8 | 306.2 | 1.0 | 1.1 | 1.1 | 1.0 |
| scFv × I2E × scFc | | | | | | | | |
| CCR8 TCE2 | 1.0 | 1.0 | 814.0 | 1.0 | 1.0 | 432.5 | 1.1 | 1.0 |
| scFab × I2E × scFc | | | | | | | | |
| Negative control | 1.0 | 1.0 | 1.0 | 1.0 | 1.0 | 1.0 | 1.0 | 1.1 |

[0215] The data in Table 5 demonstrate that CCR8-binding TCE molecules and scFab-containing CCR8-binding TCE molecules bound to the full-length N-terminal CCR8 peptide P_1-35. TCE2 bound to the truncated N-terminal CCR8 peptide P_13-24. Interestingly, TCE1 bound to the truncated N-terminal CCR8 peptide P_1-12, demonstrating that TCE1 binds a unique epitope on CCR8.

### Example 5: Antibody Functional Activity

[0216] Hybridoma supernatants were tested for blocking of CLL-1 dependent chemotaxis in HUT78 cells (human T lymphocyte cell line that endogenously expresses CCR8). Testing was done in a 96-well transwell plate with 5 μm pore size in complete HUT-78 growth medium. The cells were pre-incubated with purified antibodies for thirty minutes and transferred to the top transwell chambers (total 50 μl volume and 50,000 cells per well).

[0217] Recombinant Hu CCL1 (R&D) was prepared at suboptimal concentration of 100 μM and added to the bottom transwell chambers at 100 μl per well. The transwell plates were incubated at 37° C. with 5% CO₂ overnight. The suboptimal concentration of CCL1 was established based on the cells' chemotactic dose response curve and allowed for selection of antibodies with IC₅₀≤100 μM. At the end of incubation, the top chambers were removed and 50 μl/well of CellTiterGlo reagent (Promega) was added to the bottom chambers with migrated cells. After ten minutes of incubation at room temperature, 100 μl of the mixture from the bottom chamber was transferred to the black well clear bottom plates for Luminescence readout (Envision plate reader). Percent inhibition of chemotaxis was calculated using Basal and Max chemotaxis control wells present on each plate. Percent inhibition and IC₅₀ values were calculated using Screener analysis software. The average of three experiments is shown in Table 7.

TABLE 7
Inhibition of CCR8-expressing
HUT78 chemotaxis following
treatment with antibody.

| | Percent |
|---|---|
| | Inhibition |
| Antibody | (IC₅₀ nM) |
| Antibody 1 IgG1 | >690 |
| Antibody 2.2 IgG1 | 0.076 |
| Antibody 3.0 IgG1 | 3.7 |
| Antibody 4.0 IgG1 | 8.4 |
| Antibody 5.0 IgG1 | 13.6 |
| Antibody 6.0 IgG1 | 20.1 |

[0218] These data demonstrate that Antibody 1, which binds a unique epitope, does not block chemotactic activity, despite binding CCR8, and is not a neutralizing antibody. These data demonstrate that Antibody 1 does not block ligand binding to CCR8. Similar data were also observed in an experiment testing antibodies in hybridoma supernatant.

### Example 6: Antibody-Mediated Cytotoxicity Assay

[0219] To determine if anti-CCR8 antibodies can mediate antibody-mediated cytotoxicity (ADCC), a killing assay was developed using HUT78.luc target cells, which were stably transfected with a luciferase reporter gene and express endogenous human CCR8. Primary NK cells with VF phenotype from six different donors were used as effector cells (for data from Table 8a and Table 8b); Primary NK cells with VF phenotype from two different donors were used as effector cells (for data from Table 8c), or Primary NK cells with FF phenotype from three different donors were used with three separate bleeds for one of them as effector cells (for data from Table 8d). NK cells negative selection was done from leukopak using StemCell EasySep Hu NK isolation kit.

[0220] Purified antibodies were tested in a range of concentrations, starting at 5 μg/ml (35 nM with 1:10 dilutions). The antibodies were incubated with target and effector cells in a 384-well plate at 5% CO₂ 37° C. in a humidified incubator overnight. The effector to target ratio was 5:1 with 20,000 target cells per well in total 50 μl per well. At the end of the incubation, 30 μl per well of BioGlo (Tables 8a and 8b) or SteadyGlo (Table 8c) reagent was added, mixed, and luminescence was read on an Envision plate reader. Luminescence signal was proportional to the amount of viable target cells. The percent ADCC was calculated as (1−(luminescence signal in the presence of Ab/luminescence signal for T+E cells alone))×100. The EC₅₀ was calculated using GraphPad Prism 7. Results are shown in Tables 8a, 8b, 8c, and 8d (N.D. means not determined).

TABLE 8a
Anti-CCR8 Antibody mediated ADCC
of CCR8-expressing HUT78 cells (EC50 pM).
Percent Non-Viable cells (EC₅₀ pM)

| Antibody | Donor 1 | Donor 2 | Donor 3 |
|---|---|---|---|
| Antibody 1 IgG1 | <0.256 | 5.582 | 1.3 |
| Antibody 1.1 IgG1 | <0.256 | 8.129 | 2.2 |
| Antibody 2.1 IgG1 | <0.256 | 13.3 | 1 |
| Antibody 2.2 IgG1 | <0.256 | 6.035 | 1.8 |
| Antibody 3.0 IgG1 | <0.256 | 15.47 | N.D. |
| Antibody 4.0 IgG1 | <0.256 | 217.9 | N.D. |
| Antibody 5.0 IgG1 | <0.256 | 167 | N.D. |
| Antibody 6.0 IgG1 | 2 | 37.39 | N.D. |

TABLE 8b
Anti-CCR8 Antibody mediated ADCC
of CCR8-expressing HUT78 cells (EC50 pM).
Percent Non-Viable cells (EC₅₀ pM)

| Antibody | Donor 4 | Donor 5 | Donor 6 |
|---|---|---|---|
| Antibody 5.1 IgG1 | 3.684 | 0.8653 | 4.891 |
| Antibody 5.2 IgG1 | 6.198 | 1.008 | 6.112 |
| Antibody 5.3 IgG1 | 3.342 | 0.6424 | 3.479 |
| Antibody 5.4 IgG1 | 3.429 | 0.8886 | 4.615 |
| Antibody 5.5 IgG1 | 4.891 | 0.837 | 3.771 |
| Antibody 6.1 IgG1 | 4.518 | 1.047 | 3.617 |
| Antibody 6.2 IgG1 | 4.119 | 2.04 | 5.136 |

TABLE 8c
Anti-CCR8 Antibody mediated ADCC of
CCR8-expressing HUT78 cells (EC50 pM).
Percent Non-Viable cells (EC₅₀ pM)

| Antibody | Donor 7 |
|---|---|
| HC SEQ ID NO: 1239; | 0.52 |
| LC SEQ ID NO: 1130 | |
| HC SEQ ID NO: 1240; | 0.28 |
| LC SEQ ID NO: 1132 | |
| HC SEQ ID NO: 1238; | 0.48 |
| LC SEQ ID NO: 1128 | |
| HC SEQ ID NO: 573; | 1.14 |
| LC SEQ ID NO: 16 | |

TABLE 8d
Anti-CCR8 Antibody mediated ADCC of
CCR8-expressing HUT78 cells (EC50 pM).
Percent Non-Viable cells (EC₅₀ pM)

| Antibody | Donor 8 | Donor 9 |
|---|---|---|
| huCCR8(32360LC:K38R)_huIgG1z(mAb) | 3.0 | 2.7 |
| (HC SEQ ID NO: 1237; LC SEQ ID NO: 1126 | | |

[0221] These data demonstrate that antibodies of the present invention exhibit ADCC based killing via CCR8 receptor expressed on the surface of HUT78 cells.

### Example 7: Affinity of Anti-CCR8 Antibodies

[0222] Hybridoma supernatants containing Antibody 1 IgG2, Antibody 2 IgG2, or Antibody 4 IgG2 were evaluated by a Kinetic Exclusion Assay (KinExA) for their affinity to native cynomolgus CCR8 transiently expressed on 293T cells or to native human CCR8 expressed on HUT78 cells.

### Cynomolgus CCR8: 293T Cells

[0223] KinExA was performed in which the K_{d} was determined from the concentration of free antibody that remains in solution after equilibrium has been established between the antibody and the cell-surface-expressed antigen. KinExA provides a more sensitive determination of binding affinity for the native form of CCR8 compared to soluble CCR8. The Kinetic Exclusion Assay method was performed as essentially described in Rathanaswami et al. Anal. Biochem: 373 (1): 52-60 (2008).

[0224] Briefly, equilibrium sets were set up for each antibody using either human CCR8-expressing HUT78 cells or cynomolgus monkey CCR8-expressing 293T cells. The cells were counted using a hemocytometer. The HUT78 cells were titrated and incubated with two different constant antibody concentrations, one at 48 pM and the other at 2 nM, in HUT media (RPMI 1640, 10% FBS, 10 mM HEPES, 2 mM L-Glut, 1 mM Sod. Pyr, 0.1 mM NEAA, 50 uM 2-ME) with 0.05% Sodium Azide. For the high [Ab] equilibrium set, HUT78 cells were titrated from 62.5 million per milliliter concentration 1:2 for 10 points in eppendorf tubes and equilibrated with 2 nM antibody in a total volume of 400 μl. For the low [Ab] equilibrium set, HUT78 cells were titrated from 3.89 million per milliliter concentration, 1:2 for 10 points in 50 ml Fulcon tubes and equilibrated with 48 pM antibody in a total volume of 15.5 mL.

[0225] The cyno CCR8-expressing 293T cells were titrated and incubated with two different constant antibody concentrations, one at 118 μM and the other at 5 nM, in 293T media (Freestyle expression 293T media with 2% FBS and 50 μg/ml G418) with 0.05% Sodium Azide. For the high [Ab] equilibrium set, 293T cells were titrated from 25 million per milliliter concentration 1:3 for 10 points in eppendorf tubes and equilibrated with 5 nM antibody in a total volume of 200 μl. For the low [Ab] equilibrium set, 293T cells were titrated from 0.98 million per milliliter concentration 1:3 for 10 points in 15 ml Fulcon tubes and equilibrated with 118 μM antibody in a total volume of 10.2 mL.

[0226] For each equilibrium set, reference point controls included a sample with cell media only and a sample without cells. The equilibrium sets were incubated for 24 hours at room temperature, with shaking. After 24 hours of incubation, the supernatants were separated from the cell pellets via centrifugation at 500×g for five minutes. The supernatants of both high [Ab] and low [Ab] equilibrium sets were then run through a KinExA 3200 machine.

[0227] Each equilibrium sample set was read in duplicate on the KinExA machine. For low [Ab] equilibrium samples, 6.8 mL and 4.6 mL of each sample were run in duplicate, respectively, for human and cyno CCR8 equilibrium experiments. For high [Ab] equilibrium samples 16 μL and 75 μL of each sample were run in duplicate, respectively for human and cyno CCR8 equilibrium experiments.

[0228] PMMA (Polymethyl Methacrylate Particles) beads were coated with goat anti-human Fc Ab or Goat anti-hIgG (H+L) Ab and subsequently blocked with a blocking solution (1×PBS pH7.4+10 mg/mL BSA+0.05% Sodium Azide). For each equilibrium sample the free [Ab] was detected by running the equilibrium samples through the coated beads followed by a quick wash with the running buffer (1×PBS pH7.4+1% BSA+0.05% Sodium Azide). The secondary detection antibody (goat anti-huIgG (H+L) Alexa 647) was run through the flow cell at 680 ng/ml and 500 μL per run. The KinExA voltage output signal was used in KinExA software to calculate the K_{d}. From the plots at two different initial total [Ab] concentrations the K_{d} was obtained from curve fitting using n-curve analysis in KinExA Pro software version 4.3.11 (Sapidyne Instruments Inc.). The 95% confidence interval was given as K_{d} low and K_{d} high. Results are shown in Table 9.

TABLE 9
Determination of Kd of hybridoma supernatants
containing CCR8 antibodies for
cell-membrane-expressed cynomolgus CCR8.

| | | | 95% confidence interval | | | |
|---|---|---|---|---|---|---|
| Antibody | Kd | | Kd Low | | Kd High | |
| Antibody 1 IgG2 | 229 | pM | 73.2 | pM | 552.9 | pM |
| Antibody 2 IgG2 | >50 | nM | <1.85 | nM | >500 | nM |
| Antibody 4 IgG2 | >50 | nM | <2 | pM | >179 | nM |

### Native Human CCR8 Expressed on HUT78 Cells

[0229] Cells in media were serially diluted and incubated with 48 pM or 2 nM active binding site concentration of antibody in media in the presence of 0.05% NaN3, and allowed to equilibrate. The free mAb left in the supernatant was measured as described above. The percent free antibody was plotted against the cell concentration. N-curve analysis was performed using the equilibrium; a whole cell method was performed to determine optimal values for K_{d} and the antigen expression level. The 95% confidence intervals were determined by the software by changing iteratively the optimized value for Kd or antigen expression level while keeping other parameters at their optimal values.

[0230] The affinities of tested antibodies to endogenous human CCR8 expressed on HUT78 cells is shown in Table 10.

TABLE 10
Affinity of hybridoma supernatant containing antibodies
to endogenous human CCR8 expressed on HUT78 cells.

| | | | 95% confidence interval | | | |
|---|---|---|---|---|---|---|
| Antibody | Kd | | Kd Low | | Kd High | |
| Antibody 1 IgG2 | 216 | pM | 112.5 | pM | 420.1 | pM |
| Antibody 2 IgG2 | >5 | nM | 816 | pM | >50 | nM |
| Antibody 4 IgG2 | 378 | pM | 275.5 | pM | 540.6 | pM |

[0231] IgG2 antibodies were further engineered to increase affinity to human and/or cynomolgus monkey CCR8.

### Example 8: Cynomolgus CCR8 T4R Variant: CHO Cells

[0232] CHO cells expressing cynomolgus monkey CCR8 (comprising threonine at position four; SEQ ID NO: 22) or cynomolgus monkey CCR8 (T4R; comprising arginine at position four; SEQ ID NO: 556) were incubated with decreasing concentrations of anti-CCR8 antibodies (0.005-100 nM, step 1:3, 10 steps) for 30 minutes at 4° C. Bound anti-CCR8 antibody molecules were detected with Alexa Fluor 647 conjugated Goat anti-Human IgG (H+L). Cells were subsequently stained with Zombie Violet viability dye, fixed with 4% PFA on ice, and detected by fluorescence cytometry. Equilibrium dissociation constant (K_{d}) values were calculated by non-linear regression with the one site specific binding evaluation tool of the GraphPad Prism software. The affinities of the anti-CCR8 antibodies are shown in Table 11. “N.D.” means not detectable.

TABLE 11
Affinity of anti-CCR8 antibodies to cell-membrane-
expressed cynomolgus CCR8 variant T4R.

| | Cell based affinity | Cell based |
|---|---|---|
| | cyno CCR8 | affinity cy CCR8 |
| Antibody | Kd [nM] | (T4R) Kd [nM] |
| HuIgG1 Negative | N.D. | N.D. |
| Control | | |
| Antibody 1 IgG1 | 0.635 | N.D. |
| Antibody 1.1 IgG1 | 0.172 | N.D. |
| Antibody 2.2 IgG1 | 0.399 | 0.989 |

[0233] These data demonstrate that binding of Antibody 1 antibodies to cynomolgus CCR8 was reduced with the T4R mutation while Antibody 2 was unaffected, consistent with their respective epitope binning and clustering determined above. These data demonstrate that antibodies that bind a unique epitope as described herein bind CCR8 at threonine at position four.

### Example 9: IgG1 Afucosylated Antibodies

[0234] Afucosylated anti-CCR8 IgG1 antibodies were generated. Examples of antibody amino acid sequences of afucosylated antibodies are SEQ ID NOs.: 346 to 555, SEQ ID NOs: 1125-1160, and SEQ ID NOs: 1238-1254. SEQ ID NOs 573 to 592 and SEQ ID NOs: 1237-1254 correspond to an antibody HCs without the C-terminal lysine. Antibodies were designated according to the parental molecule. For example, Antibody 5.1, Antibody 5.2, Antibody 5.3, Antibody 5.4, Antibody 5.5, Antibody 5.6, Antibody 5.7, Antibody 5.8, and Antibody 5.9 all refer to antibodies engineered from Antibody 5. “Antibody 1 IgG2” and “Antibody 2 IgG2” refer to an IgG2 antibody, whereas “Antibody 1 IgG1” and “Antibody 2 IgG1” refer to an IgG1 afucosylated antibody. In addition, and for example, Antibody 2 IgG1 molecules were further engineered from Antibody 2 IgG2 antibodies, as described in the sequences table (Table 16), to obtain Antibody 2.1 and Antibody 2.2 IgG1 afucosylated antibodies. Antibody 2.2 IgG1, for example, comprises HCDR1, HCDR2, HCDR3, LCDR1, LCDR2, LCDR3, HCVR, LCVR, HC, and LC amino acid sequences as set out in SEQ ID NOs. 376-385, respectively.

[0235] Engineered molecules may demonstrate desirable properties, such as, but not limited to, increased affinity to human and/or cynomolgus monkey. Sites of engineering are described in the sequence table (Table 19).

[0236] The Examples described herein demonstrate the activity of afucosylated anti-CCR8 antibodies, for example ADCC activity (Example 16), in vivo studies demonstrating anti-tumor activity (Example 11) and increased survival (Example 12).

### Example 10: Treg Depleting Combination Therapy

[0237] Efficacy of administration of a bispecific T-cell engager molecule, PD-1 antagonist antibody, 4-1BB agonist antibody, and a Treg depleting antibody was determined. Mice genetically engineered to express a humanized CD38 molecule at the surface of their T cells were implanted subcutaneously with the KPC-M5 syngeneic tumor cell line with an inoculum consisting of 105 KPC-M5 cancer cells in 50 μl of PBS mixed with 50 μl of Matrigel. When tumors reached a volume of 50-100 mm³, mice were injected with one or more of a bispecific T-cell engager molecule (a bispecific molecule that binds CD3 and a target antigen), PD-1 antagonist antibody, 4-1BB agonist antibody, and a Treg depleting antibody, and tumor volume was measured over time. Depending on the bispecific T-cell engager molecule administered, the bispecific T-cell engager molecule was administered at doses ranging from 15 to 5,000 μg/kg.

[0238] Tumor-bearing mice were injected once weekly with an anti-mouse CLDN18.2 BITE® molecule via intravenous administration at a dose of 150 μg/kg. Mice were co-injected via intravenous administration every three days with an anti-mouse PD-1 mIgG1 antagonist antibody at a dose of 100 μg per mouse, an agonist antibody to the 4-1BB co-stimulatory receptor (anti-mouse 41BB rIgG1 (Clone LOB 12.3, BioXcell)) at a dose of 150 μg per mouse, and/or with a Treg-depleting antibody (mIgG1) at a dose of 300 μg per mouse. Tumor volume was measured on days 7, 10, 14, 17, and 20 post-implantation.

[0239] The data in FIG. 1 demonstrate that while minimal activity was observed with combination of anti-CTLA4 with 4-1BB agonist+anti-PD-1 or CLDN18.2 BITE® molecule alone, the quadruple combination of CLDN18.2 BITE® molecule+4-1BB agonist+anti-PD-1+anti-CTLA4 demonstrated robust efficacy, similar to that observed with CD4⁺ T cell depletion. Notably, this anti-tumor effect was associated with a pronounced increase in the intra-tumoral CD8⁺ T cell:Treg ratio. Taken together, these data demonstrate the selective activity and dependence of bispecific T-cell engager molecules on CD8⁺ T cells and suggest context dependent inhibitory roles for CD4⁺ T cells on bispecific T-cell engager molecule-mediated anti-tumor efficacy. The results also suggest a potential dominant role for Tregs in suppressing the activity bispecific T-cell engager+anti-4-1BB+anti-PD-1 combination immunotherapy.

### Example 11: CCR8 Depleting Antibody is Efficacious in the MC38 In Vivo Tumor Model

[0240] Anti-tumor activity of afucosylated anti-CCR8 mIgG2a in the MC38 syngeneic tumor model was determined. MC38 tumor cells were implanted subcutaneously in the right flank of female hCD3eKI animals on study day 0. On day 10, tumors were assigned to different treatment groups (n=10/group) with an average tumor volume of 99.93 mm³. Animals were dosed intra-peritoneally with 10 mg/kg of either control isotype mIgG2a or anti-CCR8 afucosylated mIgG2a on study days 11, 14, 17 and 20 (Q3D×4). The anti-CCR8 afucosylated mIgG2a antibody comprises LCDR1, LCDR2, LCDR3, HCDR1, HCDR2, HCDR3, LCVR, HCVR, LC, and HC amino acid sequences of SEQ ID NOs 637 through 646, respectively.

[0241] Tumor volume was measured twice per week. Statistical analysis to evaluate effect of treatment on tumor size over time of anti-CCR8 antibody relative to isotype control was performed using Linear Mixed Effects (LME) model with Dunnett's post-hoc analysis. **** indicates p<0.0001.

[0242] Individual tumor growth for the treatment groups is depicted as spider plots in FIGS. 2C and 2B. FIG. 2A demonstrates the mean tumor volume+/−SEM for each group until the last timepoint (day 24). Mice treated with the anti-CCR8 afucosylated mIgG2a antibody showed a statistically reduced tumor volume by day 24 compared to isotype control treated animals. There was one complete responder, as shown in FIG. 2B. This complete responder animal was assessed until day 48, at which time there was no measurable tumor. Animals with no measurable tumors defined as Complete Responders (CRs) were assessed until day 48. These data demonstrate that MC38 tumor-bearing animals showed a significant reduction in tumor volume when treated with an anti-CCR8 afucosylated mIgG2a antibody (66.44% TGI, **** p<0.0001) compared to isotype control.

### Example 12: CCR8 Depleting Antibody Treatment Extends Survival In Vivo

[0243] MC38 tumor cells were implanted subcutaneously in the right flank of female hCD3cKI animals on study day 0. On day 10, tumors were assigned to different treatment groups (n=10/group) with an average tumor volume of 99.93 mm³. Animals were dosed intra-peritoneally with 10 mg/kg of either isotype control mIgG2a or anti-CCR8 afucosylated mIgG2a antibody on study days 11, 14, 17 and 20 (Q3D×4). All animals were assessed until their tumors reached 800 mm³ or according to IACUC standards of animal welfare. Statistical analysis was performed using the Log-rank (Mantel-Cox) test comparing anti-CCR8 afucosylated mIgG2a antibody (treatment Grp2) to isotype control mIgG2a (control Grp1). **** indicates p<0.0001.

[0244] Survival data is shown in FIG. 3. The median survival for isotype control mIgG2a treated animals was 24 days, whereas the median survival for anti-CCR8 afucosylated mIgG2a antibody treated animals was 27 days (**** p<0.0001). These data demonstrate that MC38 tumor-bearing animals have increased survival when treated with an anti-CCR8 afucosylated mIgG2a antibody as compared to animals treated with an isotype control antibody.

### Example 13: Treg Depletion with CCR8 mIgG2a Antibody Leads to Enhanced CD8⁺/Treg Ratio in Tumors

[0245] MC38 tumor bearing animals were treated with a single 10 mg/kg dose of either control isotype mIgG2a or anti-CCR8 afucosylated mIgG2a intra-peritoneally on study day eleven. PD evaluation was performed at 48 hours post treatment (day 13). Tumor weights were collected during harvest for the different groups and used for normalization to determine absolute cell counts in tumors. Single cell suspensions of tumor, draining lymph node (DLN), and spleen were prepared for flow cytometry analysis of T cell proportions and phenotypes.

[0246] Total T cells were gated using TCRβ+Thy 1.2+staining within the Live/CD45+ fraction. Percentage and absolute numbers of Treg cells depicted in FIG. 4A were assessed within the CD4+ T cell compartment using both Foxp3+ and CD25+Foxp3+gating. CD8+ T cells were gated on total T cells and CD8/Treg ratios in tumor were calculated as depicted in FIG. 4B. Each dot represents data obtained from an individual mouse. Statistical analysis was performed using Unpaired T-test (two-tailed) comparing treatment to control group (* p<0.05, ** p<0.01).

[0247] These data demonstrate a reduction in percent Tregs following a single dose of anti-CCR8 afucosylated antibody, as assessed using both Foxp3+ and CD25+Foxp3+gating schemes (FIGS. 4A and 4B). Importantly, anti-CCR8 depleting antibody treatment resulted in significantly increased CD8+/Treg ratios in tumors (FIGS. 4C and 4D), thereby driving enhanced anti-tumor immunity.

### Example 14: CCR8-Binding scFvs Screened by Phage Display

[0248] A preferred type of an amino acid substitutional variation of the CCR8-binding molecules described herein involves substituting one or more CDR residues of a parent antibody (e.g. a humanized or human antibody). Generally, the resulting variant(s) selected for further development will have improved biological properties relative to the parent antibody from which they are generated. One way for generating such substitutional variants involves affinity maturation using phage display. Briefly, several CDR sides (e.g., 6-7 sides) were mutated to generate all possible amino acid substitutions at each side. The antibody variants thus generated were displayed in a monovalent fashion from filamentous phage particles as fusions to, e.g., the gene III product of M13 packaged within each particle. The phage-displayed variants were then screened for their biological activity (e.g., binding affinity) as disclosed herein. In order to identify candidate CDR sides for modification, alanine scanning mutagenesis was performed to identify CDR residues contributing significantly to antigen binding.

[0249] Once such variants were generated, the panel of variants was subjected to screening as described herein and antibodies with superior properties in one or more relevant assays were selected for further development. Phage display is described, for example, in Ladner et al., U.S. Pat. No. 5,223,409; Smith (1985) Science 228:1315-1317, Clackson et al., Nature, 352:624-628 (1991) and Marks et al., J. Mol. Biol., 222:581-597 (1991).

[0250] Anti-CCR8 scFvs that bind in the 1-12 amino acid epitope (amino acid sequence given by SEQ ID NO: 82) were generated and screened for epitope binding by phage display essentially as described above. Heavy and light chain amino acid sequences of scFvs that bind CCR8 in the 1-12 amino acid epitope cluster are shown in Table 12.

TABLE 12
HCVR and LCVR amino acid
SEQ ID NOs of anti-CCR8 scFvs.

| | HCVR Amino | LCVR |
|---|---|---|
| | Acid SEQ | Amino Acid |
| scFv Molecule | ID NO | SEQ ID NO |
| MPK20298-A4_SCFV huCCR8 | 953 | 954 |
| MPK20299-D2_SCFV huCCR8 | 955 | 956 |
| MPK20299-F11_SCFV huCCR8 | 957 | 958 |
| MPK20298-H6_SCFV huCCR8 | 959 | 960 |
| MPK20297-A4_SCFV huCCR8 | 961 | 962 |
| MPK20299-H8_SCFV huCCR8 | 963 | 964 |
| MPK20300-C11_SCFV huCCR8 | 965 | 966 |
| MPK20298-B1_SCFV huCCR8 | 967 | 968 |
| MPK20297-E5_SCFV huCCR8 | 969 | 970 |
| MPK20299-A3_SCFV huCCR8 | 971 | 972 |
| MPK20297-B4_SCFV huCCR8 | 973 | 974 |
| MPK20298-F6_SCFV huCCR8 | 975 | 976 |
| MPK20299-H3_SCFV huCCR8 | 977 | 978 |
| MPK20298-B9_SCFV huCCR8 | 979 | 980 |
| MPK20299-E2_SCFV huCCR8 | 981 | 982 |
| MPK20299-D6_SCFV huCCR8 | 983 | 984 |
| MPK20299-A4_SCFV huCCR8 | 985 | 986 |
| MPK20300-G5_SCFV huCCR8 | 987 | 988 |
| MPK20299-C3_SCFV huCCR8 | 989 | 990 |
| MPK20299-B7_SCFV huCCR8 | 991 | 992 |
| MPK20299-A5_SCFV huCCR8 | 993 | 994 |
| MPK20299-D1_SCFV huCCR8 | 995 | 996 |
| MPK20299-C5_SCFV huCCR8 | 997 | 998 |
| MPK20299-B5_SCFV huCCR8 | 999 | 1000 |
| MPK20299-G9_SCFV huCCR8 | 1001 | 1002 |
| MPK20299-G5_SCFV huCCR8 | 1003 | 1004 |
| MPK20298-C10_SCFV huCCR8 | 1005 | 1006 |
| MPK20298-B5_SCFV huCCR8 | 1007 | 1008 |
| MPK20299-F2_SCFV huCCR8 | 1009 | 1010 |
| MPK20298-D4_SCFV huCCR8 | 1011 | 1012 |
| MPK20297-F5_SCFV huCCR8 | 1013 | 1014 |
| MPK20299-D9_SCFV huCCR8 | 1015 | 1016 |

[0251] The anti-CCR8 scFv MPK20299-A4 was further engineered and converted into afucosylated anti-CCR8 antibodies to generate additional anti-CCR8 antibodies that bind 1-12.

### Example 15: Affinity of CCR8-Binding Antibodies to CCR8 Peptide-Nanobody Complexes

[0252] Binding affinities (K_{D} equilibrium dissociation constant) and rate constants (kₐ association rate constant, k_{d} dissociation rate constant) of an Antibody 1 Fab and CCR8-binding monoclonal antibodies (mAbs) of the present invention to a CCR8 1-12 epitope (SEQ ID NO: 82)-nanobody (Nb) fusion protein were measured using an OCTET® Biolayer Interferometry system (Sartorius AG, Göttingen, Germany). The CCR8-nanobody fusion proteins were expressed in human cells. For Fab binding, biotinylated CCR8 peptide-Nb fusions were captured on streptavidin SAX biosensors to loading levels between 2 and 4 nm and then incubated with a dilution series of the soluble Fab (top 100 nM, 6-point, 1:3 serial dilution) for 300 seconds followed by 500 seconds in buffer for dissociation. For mAb binding, mAbs were captured on an anti-huIgG Fc capture biosensor to 1 to 2 nm loading level and then incubated with a dilution series of non-biotinylated CCR8 peptide-Nb fusions (top 100 nM, 6-point, 1:3 serial dilution) for 300 seconds followed by 500 seconds in buffer for dissociation.

[0253] The OCTET® system acquires data over time (seconds) using a mechanism called Biolayer Interferometry; as proteins bind to biosensor tips, a sensitive binding signal in nm is measured by the instrument. All fiber optic tips were used once and then discarded, i.e., no regeneration. OCTET® buffer baselines, dissociation steps, and protein dilutions were made with OCTET® buffer (10 mM TRIS pH 7.5, 150 mM NaCl, 1 mM CaCl₂), 0.13% (v/v) Triton X-100 and 0.10 mg/mL BSA).

[0254] Raw data was processed with GeneData Screener v18 SPR package which uses the same data processing as the OCTET® instrument Data Analysis software (subtract average of two reference wells per column; Align Y-axis to baseline; Interstep correction align to dissociation; and Savitzky-Golay filtering). Each Fab or mAb interaction was grouped into its own sensorgram and globally fit with a 1:1 binding model to determine the association rate constant (kₐ; units M⁻¹ sec⁻¹) and the dissociation rate constant (k_{d}; units sec⁻¹). The equilibrium dissociation constant (K_{D}; units nanomolar (nM)=1×10⁻⁹ mol/L) was then calculated as a ratio of k_{d}/kₐ.

[0255] Results are shown in Table 13a and 13b. Errors in the 1:1 model fit to the processed data were reported as standard errors (i.e., kₐ error was the standard error of the association rate constant measurement while the k_{d} error was the standard error of the dissociation rate constant measurement). The standard error of the equilibrium dissociation constant (ΔK_{D}) is calculated from the statistical propagation of error as defined for the ratio of two measured variables and their standard errors (kₐ, Δ kₐ, k_{d}, Δ k_{d}).

TABLE 13a
Binding Affinities and Rate Constants of CCR8-Binding
Antibodies to CCR8 Epitope-Nanobody Complexes (1-12).

| | huCCR8 (1-12)-Nb | | | | | | |
|---|---|---|---|---|---|---|---|
| | kₐ | ka | k_{d} | kd | K_{D} | KD | isotype |
| CCR8 Fab & mAbs | (M⁻¹s⁻¹) | error | (s⁻¹) | error | (nM) | Error | Nb |
| Fab | 5.84E+05 | 6.19E+03 | 1.32E−02 | 9.20E−05 | 22.6 | 0.2 | no |
| (HCVR SEQ ID NO: 13; | | | | | | | binding |
| LCVR SEQ ID NO: 14) | | | | | | | |
| huCCR8_44379 | 1.42E+05 | 1.05E+03 | 1.34E−03 | 1.15E−05 | 9.5 | 0.1 | no |
| (VH: D61A_D72A, | | | | | | | binding |
| VL: N67Q_M99E_ | | | | | | | |
| W109F_S111A)_ | | | | | | | |
| huIgG1z (mAb) | | | | | | | |
| (HC SEQ ID NO: 1239; | | | | | | | |
| LC SEQ ID NO: 1130) | | | | | | | |
| huCCR8_44379 | 1.32E+05 | 1.40E+03 | 1.07E−03 | 1.60E−05 | 8.1 | 0.2 | no |
| (VH: D61S, VL: | | | | | | | binding |
| N67Q_M99G_ | | | | | | | |
| W109F_S111A)_ | | | | | | | |
| huIgG1z (mAb) | | | | | | | |
| (HC SEQ ID NO: 1240; | | | | | | | |
| LC SEQ ID NO: 1132) | | | | | | | |
| huCCR8_44379 | 1.22E+05 | 1.11E+03 | 1.10E−03 | 1.33E−05 | 9.0 | 0.1 | no |
| (VH: D72S, VL: | | | | | | | binding |
| N67A_S68A_M99G_ | | | | | | | |
| W109F_S111A)_ | | | | | | | |
| huIgG1z (mAb) | | | | | | | |
| (HC SEQ ID NO: 1238; | | | | | | | |
| LC SEQ ID NO: 1128) | | | | | | | |
| huCCR8 | 3.97E+05 | 1.42E+04 | 2.40E−02 | 5.59E−04 | 60.6 | 2.1 | no |
| (32360LC: K38R)_ | | | | | | | binding |
| huIg1z (mAb) | | | | | | | |
| (HC SEQ ID NO: 1237; | | | | | | | |
| LC SEQ ID NO: 1126 | | | | | | | |

TABLE 13b
Binding Affinities and Rate Constants of CCR8-Binding
Antibodies to CCR8 Epitope-Nanobody Complexes (1-25).

| | huCCR8 (1-25)[C25S]-Nb | | | | | | |
|---|---|---|---|---|---|---|---|
| | kₐ | ka | k_{d} | kd | K_{D} | KD | isotype |
| CCR8 Fab & mAbs | (M⁻¹s⁻¹) | error | (s⁻¹) | error | (nM) | Error | Nb |
| Fab | 6.06E+05 | 5.75E+03 | 1.06E−02 | 6.36E−05 | 17.4 | 0.2 | no |
| (HCVR SEQ ID NO: 13; | | | | | | | binding |
| LCVR SEQ ID NO: 14) | | | | | | | |
| huCCR8_44379 | 1.46E+05 | 1.32E+03 | 1.14E−03 | 1.39E−05 | 7.8 | 0.1 | no |
| (VH: D61A_D72A, | | | | | | | binding |
| VL: N67Q_M99E_ | | | | | | | |
| W109F_S111A)_ | | | | | | | |
| huIgG1z (mAb) | | | | | | | |
| (HC SEQ ID NO: 1239; | | | | | | | |
| LC SEQ ID NO: 1130) | | | | | | | |
| huCCR8_44379 | 1.10E+05 | 1.18E+03 | 7.98E−04 | 1.53E−05 | 7.2 | 0.2 | no |
| (VH: D61S, | | | | | | | binding |
| VL: N67Q_M99G_ | | | | | | | |
| W109F_S111A)_ | | | | | | | |
| huIgG1z (mAb) | | | | | | | |
| (HC SEQ ID NO: 1240; | | | | | | | |
| LC SEQ ID NO: 1132) | | | | | | | |
| huCCR8_44379 | 9.93E+04 | 9.76E+02 | 9.75E−04 | 1.37E−05 | 9.8 | 0.2 | no |
| (VH: D72S, VL: | | | | | | | binding |
| N67A_S68A_M99G_ | | | | | | | |
| W109F_S111A)_ | | | | | | | |
| huIgGlz (mAb) | | | | | | | |
| (HC SEQ ID NO: 1238; | | | | | | | |
| LC SEQ ID NO: 1128) | | | | | | | |

| | | |
|---|---|---|
| huCCR8 | Biphasic Binding | no |
| (32360LC: K38R)_ | | binding |
| huIgGlz (mAb) | | |
| (HC SEQ ID NO: 1237; | | |
| LC SEQ ID NO: 1126 | | |

[0256] These data demonstrate that CCR8-binding antibodies of the present invention bind to N-terminal peptides of human CCR8 containing amino acids 1-12 (SEQ ID NO: 82) and amino acids 1-25 (residues 1-25 of SEQ ID NO: 31), expressed in human cells, with high affinity.

### Example 16: ADCC in the Presence or Absence of Ligand

[0257] To determine ADCC with anti-CCR8 antibodies that either block ligand binding or do not block ligand binding, flow cytometry was utilized to measure live and dead cells in the presence of varying concentrations of ligand and anti-CCR8 antibody. In an experiment (“Study A”), 100 pM of an afucosylated anti-CCR8 antibody of the present invention which binds a unique epitope and does not block ligand binding (antibody comprising HCDR1, HCDR2, HCDR3, LCDR1, LCDR2, and LCDR3 amino acid sequences of SEQ ID NOs 1-6, respectively; “Non-blocking mAb”) or three anti-CCR8 antibodies that block ligand binding (“Blocking mAb”) were incubated with HUT78 cells that express CCR8, NK cell line NK92MI expressing CD16 (effector cells), and increasing concentrations of CCL1 (ligand) from 0.128 pM to 50 nM. In another experiment (“Study B”), similar procedures were followed as described above except increasing concentrations of CCL1 was first added to the HUT78 cells for thirty minutes, followed by addition of 100 pM antibody and effector cells. IC₅₀ values and bottom % killing values are reported in Table 14.

[0258] Following procedures essentially as described, the following data were obtained.

TABLE 14
ADCC activity of blocking and non-blocking
anti-CCR8 antibodies in the presence of CCL1.

| | Study A | Study A | Study B | Study B |
|---|---|---|---|---|
| | IC₅₀ (CCL1) | Bottom % | IC₅₀ (CCL1) | Bottom % |
| Antibody | nM | Killing | nM | Killing |
| Non-blocking mAb | 0.34 | 19.6 | 1.0 | 12.9 |
| Blocking mAb 1 | 3.0 | −2.6 | 2.3 | −8.7 |
| Blocking mAb 2 | 1.0 | 4.3 | 1.1 | 7.0 |
| Blocking mAb 3 | 2.4 | 3.6 | 2.8 | 2.8 |
| huIgG1 control | N/A | −1.5 | N/A | 1.3 |

[0259] These data demonstrate in both Study A and Study B, in the presence of ligand, the anti-CCR8 antibody of the present invention that binds a unique epitope and does not block ligand binding had high potency and also demonstrated the highest Bottom % Killing, which measures the ADCC ability at high concentrations of CCL1.

### Example 17: Anti-CCR8 and BiTE® Molecule Combination In Vivo

[0260] CCR8 depleting mouse surrogate antibody was evaluated in combination with surrogate TAA-BiTE molecule for its ability to enhance anti-tumor activity in the B16F10 tumor model. The B16F10 tumor model was chosen for this combination efficacy study since this model is refractory to checkpoint inhibitors (anti-PD1 and anti-CTLA4), and therefore can be used to assess meaningful differences with the combination therapy of BiTE molecule and anti-CCR8 mAb in this Example.

[0261] B16F10 tumor cells were engineered to express the BiTE molecule tumor-associated antigen (TAA) and implanted on the immunocompetent humanized CD3e KI strain that enables evaluation of TAA-BiTE molecules with an I2C anti-CD3 scFv recognizing human CD3e. B16F10-TAA tumor-bearing animals were treated with either single agents of CCR8 depleting mIgG2a antibody, TAA-BiTE molecule, or a combination of CCR8 depleting mIgG2a antibody and TAA-BiTE molecule.

[0262] B16F10-TAA expressing tumor cells were implanted subcutaneously in an immunocompetent mouse model expressing a humanized CD3e chain (huCD3e KI) on day 0. Tumors were assigned on day 12 into different treatment groups (n=10/group) with an average tumor volume of 108.37 mm3. Animals were dosed retro-orbitally with 50 μg/kg of either control BiTE molecule or TAA-BiTE on study days 13 and 20 (QWk×2). Animals also received 10 mg/kg of either control isotype mIgG2a or a CCR8 afucosylated mIgG2a antibody dosed intra-peritoneally on study days 13, 16, and 19 (Q3D×3).

[0263] Tumor volume was measured twice per week. Individual tumor growth for the treatment groups is depicted as spider plots in FIGS. 5A-5D. Animals with no measurable tumors defined as Complete Responders (CRs) have been assessed until day 48.

[0264] As shown in FIGS. 5A-5D, monotherapy of CCR8 mIgG2a (Grp3; FIG. 5C) was not efficacious in this cold tumor model refractory to anti-CTLA4. Monotherapy with TAA-BiTE (Grp2; FIG. 5B) led to tumor growth delay and 1 tumor-free/complete responder (CR) at end of the study. Interestingly, the combination of CCR8 mIgG2a and TAA-BiTE (Grp4; FIG. 5D) led to 7 CRs, demonstrating the significant benefit of combining CCR8 depleting mAbs with BiTE molecules to boost anti-tumor immunity.

SEQUENCES

Antibody 1 IgG2 HCDR1 (SEQ ID NO: 1)
NARMG
Antibody 1 IgG2 HCDR2 (SEQ ID NO: 2)
RIKSKTEGGTRDYAAPVKG
Antibody 1 IgG2 HCDR3 (SEQ ID NO: 3)
YSGV
Antibody 1 IgG2 LCDR1 (SEQ ID NO: 4)
KSSQSVLYSSNNKNYLA
Antibody 1 IgG2 LCDR2 (SEQ ID NO: 5)
WASTRES
Antibody 1 IgG2 LCDR3 (SEQ ID NO: 6)
QQYYSIPIT
Antibody 2 IgG2 HCDR1 (SEQ ID NO: 7)
NYGMH
Antibody 2 IgG2 HCDR2 (SEQ ID NO: 8)
VISYDGSNKFYADSVKG
Antibody 2 IgG2 HCDR3 (SEQ ID NO: 9)
AGGIGRFDY
Antibody 2 IgG2 LCDR1 (SEQ ID NO: 10)
KYSQSLLHSDGKTYLF
Antibody 2 IgG2 LCDR2 (SEQ ID NO: 11)
EVSNRFS
Antibody 2 IgG2 LCDR3 (SEQ ID NO: 12)
MQTLKLPLT
Antibody 1 IgG2 HCVR (SEQ ID NO: 13)
EVQLVESGGGLVKPGGSLRLSCAASGFTFSNARMGWVRQAPGKGLEWVGRIKSKTE
GGTRDYAAPVKGRFTISRDDSKNTLYLQMNSLKTEDTAVYYCTSYSGVWGQGTMV
TVSS
Antibody 1 IgG2 LCVR (SEQ ID NO: 14)
DIVMTQSPDSLAVSLGERATINCKSSQSVLYSSNNKNYLAWYHQKPGQSPKLLISWA
STRESGVPDRFSGSGSGTDFTLTINSLQAEDVAVYYCQQYYSIPITFGGGTKVEIKR
Antibody 1 IgG2 HC (SEQ ID NO: 15)
EVQLVESGGGLVKPGGSLRLSCAASGFTFSNARMGWVRQAPGKGLEWVGRIKSKTE
GGTRDYAAPVKGRFTISRDDSKNTLYLQMNSLKTEDTAVYYCTSYSGVWGQGTMV
TVSSASTKGPSVFPLAPCSRSTSESTAALGCLVKDYFPEPVTVSWNSGALTSGVHTFP
AVLQSSGLYSLSSVVTVPSSNFGTQTYTCNVDHKPSNTKVDKTVERKCCVECPPCPA
PPVAGPSVFLFPPKPKDTLMISRTPEVTCVVVDVSHEDPEVQFNWYVDGVEVHNAKT
KPREEQFNSTFRVVSVLTVVHQDWLNGKEYKCKVSNKGLPAPIEKTISKTKGQPREP
QVYTLPPSREEMTKNQVSLTCLVKGFYPSDIAVEWESNGQPENNYKTTPPMLDSDGS
FFLYSKLTVDKSRWQQGNVFSCSVMHEALHNHYTQKSLSLSPGK
Antibody 1 IgG2 LC (SEQ ID NO: 16)
DIVMTQSPDSLAVSLGERATINCKSSQSVLYSSNNKNYLAWYHQKPGQSPKLLISWA
STRESGVPDRFSGSGSGTDFTLTINSLQAEDVAVYYCQQYYSIPITFGGGTKVEIKRTV
AAPSVFIFPPSDEQLKSGTASVVCLLNNFYPREAKVQWKVDNALQSGNSQESVTEQD
SKDSTYSLSSTLTLSKADYEKHKVYACEVTHQGLSSPVTKSFNRGEC
Antibody 2 IgG2 HCVR (SEQ ID NO: 17)
QVQLVESGGGVVQPGRSLRLSCAASGFTFSNYGMHWVRQAPGKGLEWVAVISYDG
SNKFYADSVKGRFTISRDNSKKTLYLQMSSLRVEDTAVYYCARAGGIGRFDYWGQG
TLVTVSS
Antibody 2 IgG2 LCVR (SEQ ID NO: 18)
DFVMTQTPLSLSVTPGQPASISCKYSQSLLHSDGKTYLFWYLQKPGQPPHLLIYEVSN
RFSGVPDRFSGSGSGTDFTLKISRVEAEDVGLYYCMQTLKLPLTFGGGTKVEIN
Antibody 2 IgG2 HC (SEQ ID NO: 19)
QVQLVESGGGVVQPGRSLRLSCAASGFTFSNYGMHWVRQAPGKGLEWVAVISYDG
SNKFYADSVKGRFTISRDNSKKTLYLQMSSLRVEDTAVYYCARAGGIGRFDYWGQG
TLVTVSSASTKGPSVFPLAPCSRSTSESTAALGCLVKDYFPEPVTVSWNSGALTSGVH
TFPAVLQSSGLYSLSSVVTVPSSNFGTQTYTCNVDHKPSNTKVDKTVERKCCVECPP
CPAPPVAGPSVFLFPPKPKDTLMISRTPEVTCVVVDVSHEDPEVQFNWYVDGVEVHN
AKTKPREEQFNSTFRVVSVLTVVHQDWLNGKEYKCKVSNKGLPAPIEKTISKTKGQP
REPQVYTLPPSREEMTKNQVSLTCLVKGFYPSDIAVEWESNGQPENNYKTTPPMLDS
DGSFFLYSKLTVDKSRWQQGNVFSCSVMHEALHNHYTQKSLSLSPGK
Antibody 2 IgG2 LC (SEQ ID NO: 20)
DFVMTQTPLSLSVTPGQPASISCKYSQSLLHSDGKTYLFWYLQKPGQPPHLLIYEVSN
RFSGVPDRFSGSGSGTDFTLKISRVEAEDVGLYYCMQTLKLPLTFGGGTKVEINRTVA
APSVFIFPPSDEQLKSGTASVVCLLNNFYPREAKVQWKVDNALQSGNSQESVTEQDS
KDSTYSLSSTLTLSKADYEKHKVYACEVTHQGLSSPVTKSFNRGEC
hCCR8 (SEQ ID NO: 21)
MDYTLDLSVTTVTDYYYPDIFSSPCDAELIQTNGKLLLAVFYCLLFVFSLLGNSLVIL
VLVVCKKLRSITDVYLLNLALSDLLFVFSFPFQTYYLLDQWVFGTVMCKVVSGFYYI
GFYSSMFFITLMSVDRYLAVVHAVYALKVRTIRMGTTLCLAVWLTAIMATIPLLVFY
QVASEDGVLQCYSFYNQQTLKWKIFTNFKMNILGLLIPFTIFMFCYIKILHQLKRCQN
HNKTKAIRLVLIVVIASLLFWVPFNVVLFLTSLHSMHILDGCSISQQLTYATHVTEIISF
THCCVNPVIYAFVGEKFKKHLSEIFQKSCSQIFNYLGRQMPRESCEKSSSCQQHSSRSS
SVDYIL
Cyno CCR8 (SEQ ID NO: 22)
MDYTLDPSMTTMTDYYYPDSLSSPCDGELIQRNDKLLLAVFYCLLFVFSLLGNSLVIL
VLVVCKKLRNITDIYLLNLALSDLLFVFSFPFQTYYQLDQWVFGTVMCKVVSGFYYI
GFYSSMFFITLMSVDRYLAVVHAVYAIKVRTIRMGTTLSLVVWLTAIMATIPLLVFY
QVASEDGVLQCYSFYNQQTLKWKIFTNFEMNILGLLIPFTIFMFCYIKILHQLKRCQN
HNKTKAIRLVLIVVIASLLFWVPFNVVLFLTSLHSMHILDGCSISQQLNYATHVTEIISF
THCCVNPVIYAFVGEKFKKHLSEIFQKSCSHIFIYLGRQMPRESCEKSSSCQQHSFRSS
SIDYIL
humanCCR8[A27G] (SEQ ID NO: 23)
MDYTLDLSVTTVTDYYYPDIFSSPCDGELIQTNGKLLLAVFYCLLFVFSLLGNSLVIL
VLVVCKKLRSITDVYLLNLALSDLLFVFSFPFQTYYLLDQWVFGTVMCKVVSGFYYI
GFYSSMFFITLMSVDRYLAVVHAVYALKVRTIRMGTTLCLAVWLTAIMATIPLLVFY
QVASEDGVLQCYSFYNQQTLKWKIFTNFKMNILGLLIPFTIFMFCYIKILHQLKRCQN
HNKTKAIRLVLIVVIASLLFWVPFNVVLFLTSLHSMHILDGCSISQQLTYATHVTEIISF
THCCVNPVIYAFVGEKFKKHLSEIFQKSCSQIFNYLGRQMPRESCEKSSSCQQHSSRSS
SVDYIL
mCCR8 (SEQ ID NO: 24)
MDYTMEPNVTMTDYYPDFFTAPCDAEFLLRGSMLYLAILYCVLFVLGLLGNSLVILV
LVGCKKLRSITDIYLLNLAASDLLFVLSIPFQTHNLLDQWVFGTAMCKVVSGLYYIGF
FSSMFFITLMSVDRYLAIVHAVYAIKVRTASVGTALSLTVWLAAVTATIPLMVFYQV
ASEDGMLQCFQFYEEQSLRWKLFTHFEINALGLLLPFAILLFCYVRILQQLRGCLNHN
RTRAIKLVLTVVIVSLLFWVPFNVALFLTSLHDLHILDGCATRQRLALAIHVTEVISFT
HCCVNPVIYAFIGEKFKKHLMDVFQKSCSHIFLYLGRQMPVGALERQLSSNQRSSHSS
TLDDIL
Rat CCR8 (SEQ ID NO: 25)
MDYTLEPNVTMTDYYPDFFTTPCDTELLLRGGTLYLAVLYCILFVLGLLGNSLVILVL
VACKKLRSITDVYLLNLAASDLLFVLSIPFQTHNLLDQWVFGTVMCKVVSGLYYIGF
FSSMLFITLMSVDRYLAVVHPVHAIKVRTARVGTALSLAVWLAAIAATVPLMVFYQ
VSSEDGMLQCFQLYDEQSLRWKLFTHFEVNALGLLLPFAILLFCYVRILQQLRGCLN
HNRTRAIKLVLTIVVVSLLFWVPFNVVLFLTSLHDMHILEGCATRQRLALATHVTEVI
SFMHCCVNPVIYAFIGEKFKKHLVDVFQKSCSHIFLYVGRQMPVGALERQLSSNQRS
SHSSTLDYIL
hCCR4 (SEQ ID NO: 26)
MNPTDIADTTLDESIYSNYYLYESIPKPCTKEGIKAFGELFLPPLYSLVFVFGLLGNSV
VVLVLFKYKRLRSMTDVYLLNLAISDLLFVFSLPFWGYYAADQWVFGLGLCKMISW
MYLVGFYSGIFFVMLMSIDRYLAIVHAVFSLRARTLTYGVITSLATWSVAVFASLPGF
LFSTCYTERNHTYCKTKYSLNSTTWKVLSSLEINILGLVIPLGIMLFCYSMIIRTLQHC
KNEKKNKAVKMIFAVVVLFLGFWTPYNIVLFLETLVELEVLQDCTFERYLDYAIQAT
ETLAFVHCCLNPIIYFFLGEKFRKYILQLFKTCRGLFVLCQYCGLLQIYSADTPSSSYT
QSTMDHDLHDAL
Antibody 1 IgG2 HC DNA (SEQ ID NO: 27)
GAGGTGCAGCTGGTGGAGTCTGGGGGAGGCTTGGTAAAGCCTGGGGGGTCCCTG
AGACTCTCCTGTGCAGCCTCTGGATTTACTTTCAGTAACGCCCGGATGGGCTGGG
TCCGCCAGGCTCCAGGGAAGGGGCTGGAGTGGGTTGGCCGTATTAAAAGCAAAA
CTGAAGGTGGGACAAGAGACTACGCTGCACCCGTGAAAGGCAGATTCACCATCT
CAAGAGATGATTCAAAAAACACGCTGTATCTGCAAATGAACAGCCTGAAAACCG
AGGACACAGCCGTGTATTATTGTACCTCGTATAGTGGGGTCTGGGGCCAAGGGA
CAATGGTCACCGTCTCTTCAGCCTCCACCAAGGGCCCATCGGTCTTCCCCCTGGC
GCCCTGCTCCAGGAGCACCTCCGAGAGCACAGCGGCCCTGGGCTGCCTGGTCAA
GGACTACTTCCCCGAACCGGTGACGGTGTCGTGGAACTCAGGCGCTCTGACCAGC
GGCGTGCACACCTTCCCAGCTGTCCTACAGTCCTCAGGACTCTACTCCCTCAGCA
GCGTGGTGACCGTGCCCTCCAGCAACTTCGGCACCCAGACCTACACCTGCAACGT
AGATCACAAGCCCAGCAACACCAAGGTGGACAAGACAGTTGAGCGCAAATGTTG
TGTCGAGTGCCCACCGTGCCCAGCACCACCTGTGGCAGGACCGTCAGTCTTCCTC
TTCCCCCCAAAACCCAAGGACACCCTCATGATCTCCCGGACCCCTGAGGTCACGT
GCGTGGTGGTGGACGTGAGCCACGAAGACCCCGAGGTCCAGTTCAACTGGTACG
TGGACGGCGTGGAGGTGCATAATGCCAAGACAAAGCCACGGGAGGAGCAGTTCA
ACAGCACGTTCCGTGTGGTCAGCGTCCTCACCGTTGTGCACCAGGACTGGCTGAA
CGGCAAGGAGTACAAGTGCAAGGTCTCCAACAAAGGCCTCCCAGCCCCCATCGA
GAAAACCATCTCCAAAACCAAAGGGCAGCCCCGAGAACCACAGGTGTACACCCT
GCCCCCATCCCGGGAGGAGATGACCAAGAACCAGGTCAGCCTGACCTGCCTGGT
CAAAGGCTTCTACCCCAGCGACATCGCCGTGGAGTGGGAGAGCAATGGGCAGCC
GGAGAACAACTACAAGACCACACCTCCCATGCTGGACTCCGACGGCTCCTTCTTC
CTCTACAGCAAGCTCACCGTGGACAAGAGCAGGTGGCAGCAGGGGAACGTCTTC
TCATGCTCCGTGATGCATGAGGCTCTGCACAACCACTACACGCAGAAGAGCCTCT
CCCTGTCTCCGGGTAAATAG
Antibody 1 IgG2 LC DNA (SEQ ID NO: 28)
GACATCGTGATGACCCAGTCTCCAGACTCCCTGGCTGTGTCTCTGGGCGAGAG
GGCCACCATCAACTGCAAGTCCAGCCAGAGTGTTTTATACAGTTCCAACAATA
AGAACTACTTAGCTTGGTACCATCAGAAACCAGGACAGTCTCCTAAGCTGCTC
ATTTCCTGGGCATCTACCCGGGAATCCGGGGTCCCTGACCGATTCAGTGGCAG
CGGGTCTGGGACAGATTTCACTCTCACCATCAACAGCCTGCAGGCTGAAGATG
TGGCAGTTTATTACTGTCAACAATATTATAGTATTCCGATCACTTTCGGCGGAG
GGACCAAGGTGGAGATCAAACGA
Antibody 2 IgG2 HC DNA (SEQ ID NO: 29)
CAGGTGCAGTTGGTGGAGTCTGGGGGAGGCGTGGTCCAGCCTGGGAGGTCCCTG
AGACTCTCCTGTGCAGCCTCTGGATTCACCTTCAGTAACTATGGCATGCACTGGG
TCCGCCAGGCTCCAGGCAAGGGGCTGGAGTGGGTGGCAGTCATATCATATGATG
GAAGTAATAAATTCTATGCAGACTCCGTGAAGGGCCGATTCACCATCTCCAGAG
ACAATTCCAAGAAGACTCTGTATCTTCAAATGAGCAGCCTGAGAGTTGAGGACA
CGGCTGTATATTATTGTGCGAGAGCCGGGGGTATAGGGCGTTTTGACTACTGGGG
CCAGGGAACCCTGGTCACCGTCTCCTCAGCCTCCACCAAGGGCCCATCGGTCTTC
CCCCTGGCGCCCTGCTCCAGGAGCACCTCCGAGAGCACAGCGGCCCTGGGCTGC
CTGGTCAAGGACTACTTCCCCGAACCGGTGACGGTGTCGTGGAACTCAGGCGCTC
TGACCAGCGGCGTGCACACCTTCCCAGCTGTCCTACAGTCCTCAGGACTCTACTC
CCTCAGCAGCGTGGTGACCGTGCCCTCCAGCAACTTCGGCACCCAGACCTACACC
TGCAACGTAGATCACAAGCCCAGCAACACCAAGGTGGACAAGACAGTTGAGCGC
AAATGTTGTGTCGAGTGCCCACCGTGCCCAGCACCACCTGTGGCAGGACCGTCAG
TCTTCCTCTTCCCCCCAAAACCCAAGGACACCCTCATGATCTCCCGGACCCCTGA
GGTCACGTGCGTGGTGGTGGACGTGAGCCACGAAGACCCCGAGGTCCAGTTCAA
CTGGTACGTGGACGGCGTGGAGGTGCATAATGCCAAGACAAAGCCACGGGAGGA
GCAGTTCAACAGCACGTTCCGTGTGGTCAGCGTCCTCACCGTTGTGCACCAGGAC
TGGCTGAACGGCAAGGAGTACAAGTGCAAGGTCTCCAACAAAGGCCTCCCAGCC
CCCATCGAGAAAACCATCTCCAAAACCAAAGGGCAGCCCCGAGAACCACAGGTG
TACACCCTGCCCCCATCCCGGGAGGAGATGACCAAGAACCAGGTCAGCCTGACC
TGCCTGGTCAAAGGCTTCTACCCCAGCGACATCGCCGTGGAGTGGGAGAGCAAT
GGGCAGCCGGAGAACAACTACAAGACCACACCTCCCATGCTGGACTCCGACGGC
TCCTTCTTCCTCTACAGCAAGCTCACCGTGGACAAGAGCAGGTGGCAGCAGGGG
AACGTCTTCTCATGCTCCGTGATGCATGAGGCTCTGCACAACCACTACACGCAGA
AGAGCCTCTCCCTGTCTCCGGGTAAATAG
Antibody 2 IgG2 LC DNA (SEQ ID NO: 30)
GATTTTGTAATGACCCAGACTCCACTCTCTCTGTCCGTCACCCCTGGACAGCCGG
CCTCCATCTCCTGCAAGTATAGTCAGAGCCTCCTGCACAGTGATGGAAAGACCTA
TTTGTTTTGGTACCTGCAGAAGCCAGGCCAGCCTCCACACCTCCTGATCTATGAA
GTTTCCAACCGGTTCTCTGGAGTGCCAGATAGGTTCAGTGGCAGCGGGTCAGGGA
CAGATTTCACACTGAAGATCAGCCGGGTGGAGGCTGAGGATGTTGGGCTTTATTA
CTGCATGCAAACTTTAAAGCTTCCGCTCACTTTCGGCGGAGGGACCAAGGTGGAG
ATCAACCGA
Human CCR8 1-35 (SEQ ID NO: 31)
MDYTLDLSVTTVTDYYYPDIFSSPCDAELIQTNGK
zeluvalimab LCDR1 (SEQ ID NO: 32)
RASQGISNWLA
zeluvalimab LCDR2 (SEQ ID NO: 33)
AASSLQS
zeluvalimab LCDR3 (SEQ ID NO: 34)
QQAESFPHT
zeluvalimab HCDR1 (SEQ ID NO: 35)
SYDMS
zeluvalimab HCDR2 (SEQ ID NO: 36)
LISGGGSQTYYAESVKG
zeluvalimab HCDR3 (SEQ ID NO: 37)
PSGHYFYAMDV
zeluvalimab VL (SEQ ID NO: 38)
DIQMTQSPSSVSASVGDRVTITCRASQGISNWLAWYQQKPGKAPKLLIFAASSLQSG
VPSRFSGSGSGTDFTLTISSLQPEDFATYYCQQAESFPHTFGGGTKVEIK
zeluvalimab VH (SEQ ID NO: 39)
EVQLLESGGGLVQPGGSLRLSCAASGFTFSSYDMSWVRQAPGKGLEWVSLISGGGS
QTYYAESVKGRFTISRDNSKNTLYLQMNSLRAEDTAVYFCASPSGHYFYAMDVWG
QGTTVTVSS
zeluvalimab LC (SEQ ID NO: 40)
DIQMTQSPSSVSASVGDRVTITCRASQGISNWLAWYQQKPGKAPKLLIFAASSLQSG
VPSRFSGSGSGTDFTLTISSLQPEDFATYYCQQAESFPHTFGGGTKVEIKRTVAAPSVF
IFPPSDEQLKSGTASVVCLLNNFYPREAKVQWKVDNALQSGNSQESVTEQDSKDSTY
SLSSTLTLSKADYEKHKVYACEVTHQGLSSPVTKSFNRGEC
zeluvalimab HC (SEQ ID NO: 41)
EVQLLESGGGLVQPGGSLRLSCAASGFTFSSYDMSWVRQAPGKGLEWVSLISGGGS
QTYYAESVKGRFTISRDNSKNTLYLQMNSLRAEDTAVYFCASPSGHYFYAMDVWG
QGTTVTVSSASTKGPSVFPLAPSSKSTSGGTAALGCLVKDYFPEPVTVSWNSGALTSG
VHTFPAVLQSSGLYSLSSVVTVPSSSLGTQTYICNVNHKPSNTKVDKKVEPKSCDKT
HTCPPCPAPELLGGPSVFLFPPKPKDTLMISRTPEVTCVVVDVSHEDPEVKFNWYVD
GVEVHNAKTKPCEEQYGSTYRCVSVLTVLHQDWLNGKEYKCKVSNKALPAPIEKTI
SKAKGQPREPQVYTLPPSREEMTKNQVSLTCLVKGFYPSDIAVEWESNGQPENNYKT
TPPVLDSDGSFFLYSKLTVDKSRWQQGNVFSCSVMHEALHNHYTQKSLSLSPGK
Antibody 20A2.003 LCDR1 (SEQ ID NO: 42)
SGDKLGDKYAS
Antibody 20A2.003 LCDR2 (SEQ ID NO: 43)
QDRKRPS
Antibody 20A2.003 LCDR3 (SEQ ID NO: 44)
QAFESSTEV
Antibody 20A2.003 HCDR1 (SEQ ID NO: 45)
NYGMH
Antibody 20A2.003 HCDR2 (SEQ ID NO: 46)
LIWYDASKKYYAESVKG
Antibody 20A2.003 HCDR3 (SEQ ID NO: 47)
DPSSLTGSTGYYGMDV
Antibody 20A2.003 VL (SEQ ID NO: 48)
SYELTQPPSVSVSPGQTASITCSGDKLGDKYASWYQQKPGQSPVLVIYQDRKRPSGIP
ERFSGSNSGNTATLTISGTQAMDEADYYCQAFESSTEVFGGGTKLTVL
Antibody 20A2.003 VH (SEQ ID NO: 49)
QVQLVESGGGVVQPGRSLRLSCAASGFTFSNYGMHWVRQAPGKGLEWVALIWYDA
SKKYYAESVKGRFTISRDNSKNTLYLQMNSLRAEDTAAYYCARDPSSLTGSTGYYG
MDVWGQGTTVTVSS
Antibody 20A2.003 LC (SEQ ID NO: 50)
SYELTQPPSVSVSPGQTASITCSGDKLGDKYASWYQQKPGQSPVLVIYQDRKRPSGIP
ERFSGSNSGNTATLTISGTQAMDEADYYCQAFESSTEVFGGGTKLTVLGQPKAAPSV
TLFPPSSEELQANKATLVCLISDFYPGAVTVAWKADSSPVKAGVETTTPSKQSNNKY
AASSYLSLTPEQWKSHRSYSCQVTHEGSTVEKTVAPTECS
Antibody 20A2.003 HC (SEQ ID NO: 51)
QVQLVESGGGVVQPGRSLRLSCAASGFTFSNYGMHWVRQAPGKGLEWVALIWYDA
SKKYYAESVKGRFTISRDNSKNTLYLQMNSLRAEDTAAYYCARDPSSLTGSTGYYG
MDVWGQGTTVTVSSASTKGPSVFPLAPSSKSTSGGTAALGCLVKDYFPEPVTVSWN
SGALTSGVHTFPAVLQSSGLYSLSSVVTVPSSSLGTQTYICNVNHKPSNTKVDKKVEP
KSCDKTHTCPPCPAPELLGGPSVFLFPPKPKDTLMISRTPEVTCVVVDVSHEDPEVKF
NWYVDGVEVHNAKTKPCEEQYGSTYRCVSVLTVLHQDWLNGKEYKCKVSNKALP
APIEKTISKAKGQPREPQVYTLPPSREEMTKNQVSLTCLVKGFYPSDIAVEWESNGQP
ENNYKTTPPVLDSDGSFFLYSKLTVDKSRWQQGNVFSCSVMHEALHNHYTQKSLSL
SPGK
Antibody 22D4.006 LCDR1 (SEQ ID NO: 52)
SGDALPKKYAY
Antibody 22D4.006 LCDR2 (SEQ ID NO: 53)
EDAKRPS
Antibody 22D4.006 LCDR3 (SEQ ID NO: 54)
YSTDASGNHRV
Antibody 22D4.006 HCDR1 (SEQ ID NO: 55)
DYSMS
Antibody 22D4.006 HCDR2 (SEQ ID NO: 56)
GINWNGGRTRYADAVKG
Antibody 22D4.006 HCDR3 (SEQ ID NO: 57)
EFNNFESNWFDP
Antibody 22D4.006 VL (SEQ ID NO: 58)
SYELTQPPSVSVSPGQTARITCSGDALPKKYAYWYQQKPGQAPVLVISEDAKRPSGIP
ERFSGSSSGTMATLTISGAQVEDEADYYCYSTDASGNHRVFGGGTKLTVL
Antibody 22D4.006 VH (SEQ ID NO: 59)
EVQLVESGGSVVRPGGSLRLSCAASGFTVDDYSMSWVRQVPGKGLEWVSGINWNG
GRTRYADAVKGRFTISRDSAKNSLYLQMNSLRAEDTALYYCAREFNNFESNWFDPW
GQGTLVTVSS
Antibody 22D4.006 LC (SEQ ID NO: 60)
SYELTQPPSVSVSPGQTARITCSGDALPKKYAYWYQQKPGQAPVLVISEDAKRPSGIP
ERFSGSSSGTMATLTISGAQVEDEADYYCYSTDASGNHRVFGGGTKLTVLGQPKAAP
SVTLFPPSSEELQANKATLVCLISDFYPGAVTVAWKADSSPVKAGVETTTPSKQSNN
KYAASSYLSLTPEQWKSHRSYSCQVTHEGSTVEKTVAPTECS
Antibody 22D4.006 HC (SEQ ID NO: 61)
EVQLVESGGSVVRPGGSLRLSCAASGFTVDDYSMSWVRQVPGKGLEWVSGINWNG
GRTRYADAVKGRFTISRDSAKNSLYLQMNSLRAEDTALYYCAREFNNFESNWFDPW
GQGTLVTVSSASTKGPSVFPLAPSSKSTSGGTAALGCLVKDYFPEPVTVSWNSGALTS
GVHTFPAVLQSSGLYSLSSVVTVPSSSLGTQTYICNVNHKPSNTKVDKKVEPKSCDK
THTCPPCPAPELLGGPSVFLFPPKPKDTLMISRTPEVTCVVVDVSHEDPEVKFNWYVD
GVEVHNAKTKPCEEQYGSTYRCVSVLTVLHQDWLNGKEYKCKVSNKALPAPIEKTI
SKAKGQPREPQVYTLPPSREEMTKNQVSLTCLVKGFYPSDIAVEWESNGQPENNYKT
TPPVLDSDGSFFLYSKLTVDKSRWQQGNVFSCSVMHEALHNHYTQKSLSLSPGK
Antibody 22D4.017 LCDR1 (SEQ ID NO: 62)
SGDALPKKYAY
Antibody 22D4.017 LCDR2 (SEQ ID NO: 63)
EDAKRPS
Antibody 22D4.017 LCDR3 (SEQ ID NO: 64)
YSTDASGNHRV
Antibody 22D4.017 HCDR1 (SEQ ID NO: 65)
DYSMS
Antibody 22D4.017 HCDR2 (SEQ ID NO: 66)
GINWNAGRTRYADAVKG
Antibody 22D4.017 HCDR3 (SEQ ID NO: 67)
EFNNFESNWFDP
Antibody 22D4.017 VL (SEQ ID NO: 68)
SYELTQPPSVSVSPGQTARITCSGDALPKKYAYWYQQKPGQAPVLVISEDAKRPSGIP
ERFSGSSSGTMATLTISGAQVEDEADYYCYSTDASGNHRVFGGGTKLTVL
Antibody 22D4.017 VH (SEQ ID NO: 69)
EVQLVESGGSVVRPGGSLRLSCAASGFTVDDYSMSWVRQVPGKGLEWVSGINWNA
GRTRYADAVKGRFTISRDSAKNSLYLQMNSLRAEDTALYYCAREFNNFESNWFDPW
GQGTLVTVSS
Antibody 22D4.017 LC (SEQ ID NO: 70)
SYELTQPPSVSVSPGQTARITCSGDALPKKYAYWYQQKPGQAPVLVISEDAKRPSGIP
ERFSGSSSGTMATLTISGAQVEDEADYYCYSTDASGNHRVFGGGTKLTVLGQPKAAP
SVTLFPPSSEELQANKATLVCLISDFYPGAVTVAWKADSSPVKAGVETTTPSKQSNN
KYAASSYLSLTPEQWKSHRSYSCQVTHEGSTVEKTVAPTECS
Antibody 22D4.017 HC (SEQ ID NO: 71)
EVQLVESGGSVVRPGGSLRLSCAASGFTVDDYSMSWVRQVPGKGLEWVSGINWNA
GRTRYADAVKGRFTISRDSAKNSLYLQMNSLRAEDTALYYCAREFNNFESNWFDPW
GQGTLVTVSSASTKGPSVFPLAPSSKSTSGGTAALGCLVKDYFPEPVTVSWNSGALTS
GVHTFPAVLQSSGLYSLSSVVTVPSSSLGTQTYICNVNHKPSNTKVDKKVEPKSCDK
THTCPPCPAPELLGGPSVFLFPPKPKDTLMISRTPEVTCVVVDVSHEDPEVKFNWYVD
GVEVHNAKTKPCEEQYGSTYRCVSVLTVLHQDWLNGKEYKCKVSNKALPAPIEKTI
SKAKGQPREPQVYTLPPSREEMTKNQVSLTCLVKGFYPSDIAVEWESNGQPENNYKT
TPPVLDSDGSFFLYSKLTVDKSRWQQGNVFSCSVMHEALHNHYTQKSLSLSPGK
Antibody 20C1.006 LCDR1 (SEQ ID NO: 72)
RASQGISNWLA
Antibody 20C1.006 LCDR2 (SEQ ID NO: 73)
AASSLQS
Antibody 20C1.006 LCDR3 (SEQ ID NO: 74)
QQAESFPHT
Antibody 20C1.006 HCDR1 (SEQ ID NO: 75)
SYDMS
Antibody 20C1.006 HCDR2 (SEQ ID NO: 76)
LISGGGSNTYYAESVKG
Antibody 20C1.006 HCDR3 (SEQ ID NO: 77)
PSGHYFYAMDV
Antibody 20C1.006 VL (SEQ ID NO: 78)
DIQMTQSPSSVSASVGDRVTITCRASQGISNWLAWYQQKPGKAPKLLIFAASSLQSG
VPSRFSGSGSGTDFTLTISSLQPEDFATYYCQQAESFPHTFGGGTKVEIK
Antibody 20C1.006 VH (SEQ ID NO: 79)
EVQLLESGGGLVQPGGSLRLSCAASGFTFSSYDMSWVRQAPGKGLEWVSLISGGGS
NTYYAESVKGRFTISRDNSKNTLYLQMNSLRAEDTAVYFCASPSGHYFYAMDVWG
QGTTVTVSS
Antibody 20C1.006 LC (SEQ ID NO: 80)
DIQMTQSPSSVSASVGDRVTITCRASQGISNWLAWYQQKPGKAPKLLIFAASSLQSG
VPSRFSGSGSGTDFTLTISSLQPEDFATYYCQQAESFPHTFGGGTKVEIKRTVAAPSVF
IFPPSDEQLKSGTASVVCLLNNFYPREAKVQWKVDNALQSGNSQESVTEQDSKDSTY
SLSSTLTLSKADYEKHKVYACEVTHQGLSSPVTKSFNRGEC
Antibody 20C1.006 HC (SEQ ID NO: 81)
EVQLLESGGGLVQPGGSLRLSCAASGFTFSSYDMSWVRQAPGKGLEWVSLISGGGS
NTYYAESVKGRFTISRDNSKNTLYLQMNSLRAEDTAVYFCASPSGHYFYAMDVWG
QGTTVTVSSASTKGPSVFPLAPSSKSTSGGTAALGCLVKDYFPEPVTVSWNSGALTSG
VHTFPAVLQSSGLYSLSSVVTVPSSSLGTQTYICNVNHKPSNTKVDKKVEPKSCDKT
HTCPPCPAPELLGGPSVFLFPPKPKDTLMISRTPEVTCVVVDVSHEDPEVKFNWYVD
GVEVHNAKTKPCEEQYGSTYRCVSVLTVLHQDWLNGKEYKCKVSNKALPAPIEKTI
SKAKGQPREPQVYTLPPSREEMTKNQVSLTCLVKGFYPSDIAVEWESNGQPENNYKT
TPPVLDSDGSFFLYSKLTVDKSRWQQGNVFSCSVMHEALHNHYTQKSLSLSPGK
CCR8 P_1-12 peptide (SEQ ID NO: 82)
MDYTLDLSVTTV
CCR8 P_13-24 peptide (SEQ ID NO: 83)
TDYYYPDIFSSP
CCR8 P_25-35 peptide (SEQ ID NO: 84)
CDAELIQTNGK
CCR8 P_7-18 peptide (SEQ ID NO: 85)
LSVTTVTDYYYP
CCR8 P_19-30 peptide (SEQ ID NO: 86)
DIFSSPCDAELI

TABLE 15
BiTE Molecule Sequences.

| | |
|---|---|
| DESCRIPTION | SEQUENCE |

CD3 BINDING DOMAIN (I2C)

| | | |
|---|---|---|
| 87 | Anti-CD3 CDR-L1 | GSSTGAVTSGNYPN |
| | (I2C) | |
| 88 | Anti-CD3 CDR-L2 | GTKFLAP |
| | (I2C) | |
| 89 | Anti-CD3 CDR-L3 | VLWYSNRWV |
| | (I2C) | |
| 90 | Anti-CD3 CDR-H1 | KYAMN |
| | (I2C) | |
| 91 | Anti-CD3 CDR-H2 | RIRSKYNNYATYYADSVKD |
| | (I2C) | |
| 92 | Anti-CD3 CDR-H3 | HGNFGNSYISYWAY |
| | (I2C) | |
| 93 | Anti-CD3 VH (I2C) | EVQLVESGGGLVQPGGSLKLSCAASGFTFNKYAMNWV |
| | | RQAPGKGLEWVARIRSKYNNYATYYADSVKDRFTISRD |
| | | DSKNTAYLQMNNLKTEDTAVYYCVRHGNFGNSYISYW |
| | | AYWGQGTLVTVSS |
| 94 | Anti-CD3 VL (I2C) | QTVVTQEPSLTVSPGGTVTLTCGSSTGAVTSGNYPNWV |
| | | QQKPGQAPRGLIGGTKFLAPGTPARFSGSLLGGKAALTL |
| | | SGVQPEDEAEYYCVLWYSNRWVFGGGTKLTVL |
| 95 | Anti-CD3 VH-VL | EVQLVESGGGLVQPGGSLKLSCAASGFTFNKYAMNWV |
| | (I2C) | RQAPGKGLEWVARIRSKYNNYATYYADSVKDRFTISRD |
| | | DSKNTAYLQMNNLKTEDTAVYYCVRHGNFGNSYISYW |
| | | AYWGQGTLVTVSSGGGGSGGGGSGGGGSQTVVTQEPS |
| | | LTVSPGGTVTLTCGSSTGAVTSGNYPNWVQQKPGQAPR |
| | | GLIGGTKFLAPGTPARFSGSLLGGKAALTLSGVQPEDEA |
| | | EYYCVLWYSNRWVFGGGTKLTVL |

CD3 BINDING DOMAIN (I2E)

| | | |
|---|---|---|
| 96 | Anti-CD3 CDR-L1 | GSSTGAVTSGNYPN |
| | (I2E) | |
| 97 | Anti-CD3 CDR-L2 | GTKFLAP |
| | (I2E) | |
| 98 | Anti-CD3 CDR-L3 | VLWYSNRWV |
| | (I2E) | |
| 99 | Anti-CD3 CDR-H1 | KYAIN |
| | (I2E) | |
| 100 | Anti-CD3 CDR-H2 | RIRSKYNNYATYYADAVKD |
| | (I2E) | |
| 101 | Anti-CD3 CDR-H3 | AGNFGSSYISYWAY |
| | (I2E) | |
| 102 | Anti-CD3 VH (I2E) | EVQLVESGGGLVQPGGSLKLSCAASGFTFNKYAINWVR |
| | | QAPGKGLEWVARIRSKYNNYATYYADAVKDRFTISRD |
| | | DSKNTVYLQMNNLKTEDTAVYYCARAGNFGSSYISYW |
| | | AYWGQGTLVTVSS |
| 103 | Anti-CD3 VL (I2E) | QTVVTQEPSLTVSPGGTVTITCGSSTGAVTSGNYPNWV |
| | | QKKPGQAPRGLIGGTKFLAPGTPARFSGSLSGGKAALTL |
| | | SGVQPEDEAEYYCVLWYSNRWVFGSGTKLTVL |

CD33

| | | |
|---|---|---|
| 104 | Anti-CD33 CDR-L1 | KSSQSVLDSSTNKNSLA |
| | (E11) | |
| 105 | Anti-CD33 CDR-L2 | WASTRES |
| | (E11) | |
| 106 | Anti-CD33 CDR-L3 | QQSAHFPIT |
| | (E11) | |
| 107 | Anti-CD33 CDR-H1 | NYGMN |
| | (E11) | |
| 108 | Anti-CD33 CDR-H2 | WINTYTGEPTYADKFQG |
| | (E11) | |
| 109 | Anti-CD33 CDR-H3 | WSWSDGYYVYFDY |
| | (E11) | |
| 110 | Anti-CD33 VH with | QVQLVQSGAEVKKPGESVKVSCKASGYTFTNYGMNW |
| | cys-clamp (E11) | VKQAPGQCLEWMGWINTYTGEPTYADKFQGRVTMTT |
| | | DTSTSTAYMEIRNLGGDDTAVYYCARWSWSDGYYVYF |
| | | DYWGQGTSVTVSS |
| ill | Anti-CD33 VH without | QVQLVQSGAEVKKPGESVKVSCKASGYTFTNYGMNW |
| | cys-clamp (E11) | VKQAPGQGLEWMGWINTYTGEPTYADKFQGRVTMTT |
| | | DTSTSTAYMEIRNLGGDDTAVYYCARWSWSDGYYVYF |
| | | DYWGQGTSVTVSS |
| 112 | Anti-CD33 VL with | DIVMTQSPDSLTVSLGERTTINCKSSQSVLDSSTNKNSL |
| | cys-clamp (E11) | AWYQQKPGQPPKLLLSWASTRESGIPDRFSGSGSGTDFT |
| | | LTIDSPQPEDSATYYCQQSAHFPITFGCGTRLEIK |
| 113 | Anti-CD33 VL without | DIVMTQSPDSLTVSLGERTTINCKSSQSVLDSSTNKNSL |
| | cys-clamp (E11) | AWYQQKPGQPPKLLLSWASTRESGIPDRFSGSGSGTDFT |
| | | LTIDSPQPEDSATYYCQQSAHFPITFGQGTRLEIK |
| 114 | CD33 scFv with cys- | QVQLVQSGAEVKKPGESVKVSCKASGYTFTNYGMNW |
| | clamp E11 | VKQAPGQCLEWMGWINTYTGEPTYADKFQGRVTMTT |
| | | DTSTSTAYMEIRNLGGDDTAVYYCARWSWSDGYYVYF |
| | | DYWGQGTSVTVSSGGGGSGGGGSGGGGSDIVMTQSPD |
| | | SLTVSLGERTTINCKSSQSVLDSSTNKNSLAWYQQKPG |
| | | QPPKLLLSWASTRESGIPDRFSGSGSGTDFTLTIDSPQPE |
| | | DSATYYCQQSAHFPITFGCGTRLEIK |
| 115 | CD33 scFv without | QVQLVQSGAEVKKPGESVKVSCKASGYTFTNYGMNW |
| | cys-clamp El l | VKQAPGQGLEWMGWINTYTGEPTYADKFQGRVTMTT |
| | | DTSTSTAYMEIRNLGGDDTAVYYCARWSWSDGYYVYF |
| | | DYWGQGTSVTVSSGGGGSGGGGSGGGGSDIVMTQSPD |
| | | SLTVSLGERTTINCKSSQSVLDSSTNKNSLAWYQQKPG |
| | | QPPKLLLSWASTRESGIPDRFSGSGSGTDFTLTIDSPQPE |
| | | DSATYYCQQSAHFPITFGQGTRLEIK |
| 116 | Anti-CD33 with cys- | QVQLVQSGAEVKKPGESVKVSCKASGYTFTNYGMNW |
| | clamp (E11) x anti- | VKQAPGQCLEWMGWINTYTGEPTYADKFQGRVTMTT |
| | CD3 (I2C) | DTSTSTAYMEIRNLGGDDTAVYYCARWSWSDGYYVYF |
| | Bispecific molecule | DYWGQGTSVTVSSGGGGSGGGGSGGGGSDIVMTQSPD |
| | | SLTVSLGERTTINCKSSQSVLDSSTNKNSLAWYQQKPG |
| | | QPPKLLLSWASTRESGIPDRFSGSGSGTDFTLTIDSPQPE |
| | | DSATYYCQQSAHFPITFGCGTRLEIKSGGGGSEVQLVES |
| | | GGGLVQPGGSLKLSCAASGFTFNKYAMNWVRQAPGK |
| | | GLEWVARIRSKYNNYATYYADSVKDRFTISRDDSKNTA |
| | | YLQMNNLKTEDTAVYYCVRHGNFGNSYISYWAYWGQ |
| | | GTLVTVSSGGGGSGGGGSGGGGSQTVVTQEPSLTVSPG |
| | | GTVTLTCGSSTGAVTSGNYPNWVQQKPGQAPRGLIGGT |
| | | KFLAPGTPARFSGSLLGGKAALTLSGVQPEDEAEYYCV |
| | | LWYSNRWVFGGGTKLTVL |
| 117 | Anti-CD33 with cys- | QVQLVQSGAEVKKPGESVKVSCKASGYTFTNYGMNW |
| | clamp (E11) x anti- | VKQAPGQCLEWMGWINTYTGEPTYADKFQGRVTMTT |
| | CD3 (I2C) | DTSTSTAYMEIRNLGGDDTAVYYCARWSWSDGYYVYF |
| | scFc Bispecific HLE | DYWGQGTSVTVSSGGGGSGGGGSGGGGSDIVMTQSPD |
| | molecule | SLTVSLGERTTINCKSSQSVLDSSTNKNSLAWYQQKPG |
| | | QPPKLLLSWASTRESGIPDRFSGSGSGTDFTLTIDSPQPE |
| | | DSATYYCQQSAHFPITFGCGTRLEIKSGGGGSEVQLVES |
| | | GGGLVQPGGSLKLSCAASGFTFNKYAMNWVRQAPGK |
| | | GLEWVARIRSKYNNYATYYADSVKDRFTISRDDSKNTA |
| | | YLQMNNLKTEDTAVYYCVRHGNFGNSYISYWAYWGQ |
| | | GTLVTVSSGGGGSGGGGSGGGGSQTVVTQEPSLTVSPG |
| | | GTVTLTCGSSTGAVTSGNYPNWVQQKPGQAPRGLIGGT |
| | | KFLAPGTPARFSGSLLGGKAALTLSGVQPEDEAEYYCV |
| | | LWYSNRWVFGGGTKLTVLGGGGDKTHTCPPCPAPELL |
| | | GGPSVFLFPPKPKDTLMISRTPEVTCVVVDVSHEDPEVK |
| | | FNWYVDGVEVHNAKTKPCEEQYGSTYRCVSVLTVLHQ |
| | | DWLNGKEYKCKVSNKALPAPIEKTISKAKGQPREPQVY |
| | | TLPPSREEMTKNQVSLTCLVKGFYPSDIAVEWESNGQPE |
| | | NNYKTTPPVLDSDGSFFLYSKLTVDKSRWQQGNVFSCS |
| | | VMHEALHNHYTQKSLSLSPGKGGGGSGGGGSGGGGSG |
| | | GGGSGGGGSGGGGSDKTHTCPPCPAPELLGGPSVFLFPP |
| | | KPKDTLMISRTPEVTCVVVDVSHEDPEVKFNWYVDGV |
| | | EVHNAKTKPCEEQYGSTYRCVSVLTVLHQDWLNGKEY |
| | | KCKVSNKALPAPIEKTISKAKGQPREPQVYTLPPSREEM |
| | | TKNQVSLTCLVKGFYPSDIAVEWESNGQPENNYKTTPP |
| | | VLDSDGSFFLYSKLTVDKSRWQQGNVFSCSVMHEALH |
| | | NHYTQKSLSLSPGK |
| 118 | Anti-CD33 bispecific | QVQLVQSGAE VKKPGESVKV SCKASGYTFT |
| | molecule with His-tag | NYGMNWVKQA PGQGLEWMGW INTYTGEPTY |
| | (no cys clamp) | ADKFQGRVTM TTDTSTSTAY MEIRNLGGDD |
| | | TAVYYCARWS WSDGYYVYFD YWGQGTSVTV |
| | | SSGGGGSGGG GSGGGGSDIV MTQSPDSLTV |
| | | SLGERTTINC KSSQSVLDSS TNKNSLAWYQ |
| | | QKPGQPPKLL LSWASTRESG IPDRFSGSGS |
| | | GTDFTLTIDS PQPEDSATYY CQQSAHFPIT |
| | | FGQGTRLEIK SGGGGSEVQL VESGGGLVQP |
| | | GGSLKLSCAA SGFTFNKYAM NWVRQAPGKG |
| | | LEWVARIRSK YNNYATYYAD SVKDRFTISR |
| | | DDSKNTAYLQ MNNLKTEDTA VYYCVRHGNF |
| | | GNSYISYWAY WGQGTLVTVS SGGGGSGGGG |
| | | SGGGGSQTVV TQEPSLTVSP GGTVTLTCGS |
| | | STGAVTSGNY PNWVQQKPGQ APRGLIGGTK |
| | | FLAPGTPARF SGSLLGGKAA LTLSGVQPED |
| | | EAEYYCVLWY SNRWVFGGGT KLTVLHHHHH H |

EGFRVIII

| | | |
|---|---|---|
| 119 | Anti-EGFRvIII CDR- | RSSQSLVHSDGNTYLS |
| | L1 | |
| 120 | Anti-EGFRvIII CDR- | RISRRFS |
| | L2 | |
| 121 | Anti-EGFRvIII CDR- | MQSTHVPRT |
| | L3 | |
| 122 | Anti-EGFRvIII CDR- | NYGMH |
| | H1 | |
| 123 | Anti-EGFRvIII CDR- | VIWYDGSDKYYADSVRG |
| | H2 | |
| 124 | Anti-EGFRvIII CDR- | DGYDILTGNPRDFDY |
| | H3 | |
| 125 | Anti-EGFRvIII VH | QVQLVESGGGVVQSGRSLRLSCAASGFTFRNYGMHWV |
| | | RQAPGKCLEWVAVIWYDGSDKYYADSVRGRFTISRDN |
| | | SKNTLYLQMNSLRAEDTAVYYCARDGYDILTGNPRDF |
| | | DYWGQGTLVTVSS |
| 126 | Anti-EGFRvIII VL | DTVMTQTPLSSHVTLGQPASISCRSSQSLVHSDGNTYLS |
| | | WLQQRPGQPPRLLIYRISRRFSGVPDRFSGSGAGTDFTL |
| | | EISRVEAEDVGVYYCMQSTHVPRTFGCGTKVEIK |
| 127 | EGFRvIII scFv | QVQLVESGGGVVQSGRSLRLSCAASGFTFRNYGMHWV |
| | | RQAPGKCLEWVAVIWYDGSDKYYADSVRGRFTISRDN |
| | | SKNTLYLQMNSLRAEDTAVYYCARDGYDILTGNPRDF |
| | | DYWGQGTLVTVSSGGGGSGGGGSGGGGSDTVMTQTPL |
| | | SSHVTLGQPASISCRSSQSLVHSDGNTYLSWLQQRPGQP |
| | | PRLLIYRISRRFSGVPDRFSGSGAGTDFTLEISRVEAEDV |
| | | GVYYCMQSTHVPRTFGCGTKVEIK |
| 128 | EGFRvIII_CCxCD3 | QVQLVESGGGVVQSGRSLRLSCAASGFTFRNYGMHWV |
| | Bispecific molecule | RQAPGKCLEWVAVIWYDGSDKYYADSVRGRFTISRDN |
| | | SKNTLYLQMNSLRAEDTAVYYCARDGYDILTGNPRDF |
| | | DYWGQGTLVTVSSGGGGSGGGGSGGGGSDTVMTQTPL |
| | | SSHVTLGQPASISCRSSQSLVHSDGNTYLSWLQQRPGQP |
| | | PRLLIYRISRRFSGVPDRFSGSGAGTDFTLEISRVEAEDV |
| | | GVYYCMQSTHVPRTFGCGTKVEIKSGGGGSEVQLVESG |
| | | GGLVQPGGSLKLSCAASGFTFNKYAMNWVRQAPGKGL |
| | | EWVARIRSKYNNYATYYADSVKDRFTISRDDSKNTAYL |
| | | QMNNLKTEDTAVYYCVRHGNFGNSYISYWAYWGQGT |
| | | LVTVSSGGGGSGGGGSGGGGSQTVVTQEPSLTVSPGGT |
| | | VTLTCGSSTGAVTSGNYPNWVQQKPGQAPRGLIGGTKF |
| | | LAPGTPARFSGSLLGGKAALTLSGVQPEDEAEYYCVLW |
| | | YSNRWVFGGGTKLTVL |
| 129 | EGFRvIII_CCxCD3- | QVQLVESGGGVVQSGRSLRLSCAASGFTFRNYGMHWV |
| | scFc Bispecific HLE | RQAPGKCLEWVAVIWYDGSDKYYADSVRGRFTISRDN |
| | molecule | SKNTLYLQMNSLRAEDTAVYYCARDGYDILTGNPRDF |
| | | DYWGQGTLVTVSSGGGGSGGGGSGGGGSDTVMTQTPL |
| | | SSHVTLGQPASISCRSSQSLVHSDGNTYLSWLQQRPGQP |
| | | PRLLIYRISRRFSGVPDRFSGSGAGTDFTLEISRVEAEDV |
| | | GVYYCMQSTHVPRTFGCGTKVEIKSGGGGSEVQLVESG |
| | | GGLVQPGGSLKLSCAASGFTFNKYAMNWVRQAPGKGL |
| | | EWVARIRSKYNNYATYYADSVKDRFTISRDDSKNTAYL |
| | | QMNNLKTEDTAVYYCVRHGNFGNSYISYWAYWGQGT |
| | | LVTVSSGGGGSGGGGSGGGGSQTVVTQEPSLTVSPGGT |
| | | VTLTCGSSTGAVTSGNYPNWVQQKPGQAPRGLIGGTKF |
| | | LAPGTPARFSGSLLGGKAALTLSGVQPEDEAEYYCVLW |
| | | YSNRWVFGGGTKLTVLGGGGDKTHTCPPCPAPELLGGP |
| | | SVFLFPPKPKDTLMISRTPEVTCVVVDVSHEDPEVKFNW |
| | | YVDGVEVHNAKTKPCEEQYGSTYRCVSVLTVLHQDWL |
| | | NGKEYKCKVSNKALPAPIEKTISKAKGQPREPQVYTLPP |
| | | SREEMTKNQVSLTCLVKGFYPSDIAVEWESNGQPENNY |
| | | KTTPPVLDSDGSFFLYSKLTVDKSRWQQGNVFSCSVMH |
| | | EALHNHYTQKSLSLSPGKGGGGSGGGGSGGGGSGGGG |
| | | SGGGGSGGGGSDKTHTCPPCPAPELLGGPSVFLFPPKPK |
| | | DTLMISRTPEVTCVVVDVSHEDPEVKFNWYVDGVEVH |
| | | NAKTKPCEEQYGSTYRCVSVLTVLHQDWLNGKEYKCK |
| | | VSNKALPAPIEKTISKAKGQPREPQVYTLPPSREEMTKN |
| | | QVSLTCLVKGFYPSDIAVEWESNGQPENNYKTTPPVLD |
| | | SDGSFFLYSKLTVDKSRWQQGNVFSCSVMHEALHNHY |
| | | TQKSLSLSPGK |

ANTI-MSLN

| | | |
|---|---|---|
| 130 | Anti-MSLN CDR-H1 | DYYMT |
| 131 | Anti-MSLN CDR-H2 | YISSSGSTIYYADSVKG |
| 132 | Anti-MSLN CDR-H3 | DRNSHFDY |
| 133 | Anti-MSLN CDR-L1 | RASQGINTWLA |
| 134 | Anti-MSLN CDR-L2 | GASGLQS |
| 135 | Anti-MSLN CDR-L3 | QQAKSFPRT |
| 136 | Anti-MSLN VH | QVQLVESGGGLVKPGGSLRLSCAASGFTFSDYYMTWIR |
| | | QAPGKGLEWLSYISSSGSTIYYADSVKGRFTISRDNAKN |
| | | SLFLQMNSLRAEDTAVYYCARDRNSHFDYWGQGTLVT |
| | | VSS |
| 137 | Anti-MSLN VL | DIQMTQSPSSVSASVGDRVTITCRASQGINTWLAWYQQ |
| | | KPGKAPKLLIYGASGLQSGVPSRFSGSGSGTDFTLTISSL |
| | | QPEDFATYYCQQAKSFPRTFGQGTKVEIK |
| 138 | Anti-MSLN scFv | QVQLVESGGGLVKPGGSLRLSCAASGFTFSDYYMTWIR |
| | | QAPGKGLEWLSYISSSGSTIYYADSVKGRFTISRDNAKN |
| | | SLFLQMNSLRAEDTAVYYCARDRNSHFDYWGQGTLVT |
| | | VSSGGGGSGGGGSGGGGSDIQMTQSPSSVSASVGDRVT |
| | | ITCRASQGINTWLAWYQQKPGKAPKLLIYGASGLQSGV |
| | | PSRFSGSGSGTDFTLTISSLQPEDFATYYCQQAKSFPRTF |
| | | GQGTKVEIK |
| 139 | Anti-MSLN_5 x CD3 | QVQLVESGGGLVKPGGSLRLSCAASGFTFSDYYMTWIR |
| | (I2C) | QAPGKGLEWLSYISSSGSTIYYADSVKGRFTISRDNAKN |
| | bispecific molecule | SLFLQMNSLRAEDTAVYYCARDRNSHFDYWGQGTLVT |
| | | VSSGGGGSGGGGSGGGGSDIQMTQSPSSVSASVGDRVT |
| | | ITCRASQGINTWLAWYQQKPGKAPKLLIYGASGLQSGV |
| | | PSRFSGSGSGTDFTLTISSLQPEDFATYYCQQAKSFPRTF |
| | | GQGTKVEIKSGGGGSEVQLVESGGGLVQPGGSLKLSCA |
| | | ASGFTFNKYAMNWVRQAPGKGLEWVARIRSKYNNYA |
| | | TYYADSVKDRFTISRDDSKNTAYLQMNNLKTEDTAVY |
| | | YCVRHGNFGNSYISYWAYWGQGTLVTVSSGGGGSGGG |
| | | GSGGGGSQTVVTQEPSLTVSPGGTVTLTCGSSTGAVTS |
| | | GNYPNWVQQKPGQAPRGLIGGTKFLAPGTPARFSGSLL |
| | | GGKAALTLSGVQPEDEAEYYCVLWYSNRWVFGGGTK |
| | | LTVL |
| 140 | MSLN_5xCD3-scFc | QVQLVESGGGLVKPGGSLRLSCAASGFTFSDYYMTWIR |
| | Bispecific HLE | QAPGKGLEWLSYISSSGSTIYYADSVKGRFTISRDNAKN |
| | molecule | SLFLQMNSLRAEDTAVYYCARDRNSHFDYWGQGTLVT |
| | | VSSGGGGSGGGGSGGGGSDIQMTQSPSSVSASVGDRVT |
| | | ITCRASQGINTWLAWYQQKPGKAPKLLIYGASGLQSGV |
| | | PSRFSGSGSGTDFTLTISSLQPEDFATYYCQQAKSFPRTF |
| | | GQGTKVEIKSGGGGSEVQLVESGGGLVQPGGSLKLSCA |
| | | ASGFTFNKYAMNWVRQAPGKGLEWVARIRSKYNNYA |
| | | TYYADSVKDRFTISRDDSKNTAYLQMNNLKTEDTAVY |
| | | YCVRHGNFGNSYISYWAYWGQGTLVTVSSGGGGSGGG |
| | | GSGGGGSQTVVTQEPSLTVSPGGTVTLTCGSSTGAVTS |
| | | GNYPNWVQQKPGQAPRGLIGGTKFLAPGTPARFSGSLL |
| | | GGKAALTLSGVQPEDEAEYYCVLWYSNRWVFGGGTK |
| | | LTVLGGGGDKTHTCPPCPAPELLGGPSVFLFPPKPKDTL |
| | | MISRTPEVTCVVVDVSHEDPEVKFNWYVDGVEVHNAK |
| | | TKPCEEQYGSTYRCVSVLTVLHQDWLNGKEYKCKVSN |
| | | KALPAPIEKTISKAKGQPREPQVYTLPPSREEMTKNQVS |
| | | LTCLVKGFYPSDIAVEWESNGQPENNYKTTPPVLDSDG |
| | | SFFLYSKLTVDKSRWQQGNVFSCSVMHEALHNHYTQK |
| | | SLSLSPGKGGGGSGGGGSGGGGSGGGGSGGGGSGGGG |
| | | SDKTHTCPPCPAPELLGGPSVFLFPPKPKDTLMISRTPEV |
| | | TCVVVDVSHEDPEVKFNWYVDGVEVHNAKTKPCEEQ |
| | | YGSTYRCVSVLTVLHQDWLNGKEYKCKVSNKALPAPI |
| | | EKTISKAKGQPREPQVYTLPPSREEMTKNQVSLTCLVK |
| | | GFYPSDIAVEWESNGQPENNYKTTPPVLDSDGSFFLYSK |
| | | LTVDKSRWQQGNVFSCSVMHEALHNHYTQKSLSLSPG |
| | | K |
| 141 | MSLN_5_CCxCD3- | QVQLVESGGGLVKPGGSLRLSCAASGFTFSDYYMTWIR |
| | scFc Bispecific HLE | QAPGKCLEWLSYISSSGSTIYYADSVKGRFTISRDNAKN |
| | molecule (with cys- | SLFLQMNSLRAEDTAVYYCARDRNSHFDYWGQGTLVT |
| | clamp) | VSSGGGGSGGGGSGGGGSDIQMTQSPSSVSASVGDRVT |
| | | ITCRASQGINTWLAWYQQKPGKAPKLLIYGASGLQSGV |
| | | PSRFSGSGSGTDFTLTISSLQPEDFATYYCQQAKSFPRTF |
| | | GCGTKVEIKSGGGGSEVQLVESGGGLVQPGGSLKLSCA |
| | | ASGFTFNKYAMNWVRQAPGKGLEWVARIRSKYNNYA |
| | | TYYADSVKDRFTISRDDSKNTAYLQMNNLKTEDTAVY |
| | | YCVRHGNFGNSYISYWAYWGQGTLVTVSSGGGGSGGG |
| | | GSGGGGSQTVVTQEPSLTVSPGGTVTLTCGSSTGAVTS |
| | | GNYPNWVQQKPGQAPRGLIGGTKFLAPGTPARFSGSLL |
| | | GGKAALTLSGVQPEDEAEYYCVLWYSNRWVFGGGTK |
| | | LTVLGGGGDKTHTCPPCPAPELLGGPSVFLFPPKPKDTL |
| | | MISRTPEVTCVVVDVSHEDPEVKFNWYVDGVEVHNAK |
| | | TKPCEEQYGSTYRCVSVLTVLHQDWLNGKEYKCKVSN |
| | | KALPAPIEKTISKAKGQPREPQVYTLPPSREEMTKNQVS |
| | | LTCLVKGFYPSDIAVEWESNGQPENNYKTTPPVLDSDG |
| | | SFFLYSKLTVDKSRWQQGNVFSCSVMHEALHNHYTQK |
| | | SLSLSPGKGGGGSGGGGSGGGGSGGGGSGGGGSGGGG |
| | | SDKTHTCPPCPAPELLGGPSVFLFPPKPKDTLMISRTPEV |
| | | TCVVVDVSHEDPEVKFNWYVDGVEVHNAKTKPCEEQ |
| | | YGSTYRCVSVLTVLHQDWLNGKEYKCKVSNKALPAPI |
| | | EKTISKAKGQPREPQVYTLPPSREEMTKNQVSLTCLVK |
| | | GFYPSDIAVEWESNGQPENNYKTTPPVLDSDGSFFLYSK |
| | | LTVDKSRWQQGNVFSCSVMHEALHNHYTQKSLSLSPG |
| | | K |

CDH19

| | | |
|---|---|---|
| 142 | Anti-CDH19 CDR-H1 | SYGMH |
| 143 | Anti-CDH19 CDR-H2 | FIWYEGSNKYYAESVKD |
| 144 | Anti-CDH19 CDR-H3 | RAGIIGTIGYYYGMDV |
| 145 | Anti-CDH19 CDR-L1 | SGDRLGEKYTS |
| 146 | Anti-CDH19 CDR-L2 | QDTKRPS |
| 147 | Anti-CDH19 CDR-L3 | QAWESSTVV |
| 148 | Anti-CDH19 VH | QVQLVESGGGVVQPGGSLRLSCAASGFTFSSYGMHWV |
| | | RQAPGKGLEWVAFIWYEGSNKYYAESVKDRFTISRDNS |
| | | KNTLYLQMNSLRAEDTAVYYCARRAGIIGTIGYYYGM |
| | | DVWGQGTTVTVSS |
| 149 | CDH19 65254.007 VH | QVQLVESGGGVVQPGGSLRLSCAASGFTFSSYGMHWV |
| | with Cys clamp | RQAPGKCLEWVAFIWYEGSNKYYAESVKDRFTISRDNS |
| | | KNTLYLQMNSLRAEDTAVYYCARRAGIIGTIGYYYGM |
| | | DVWGQGTTVTVSS |
| 150 | Anti-CDH19 VL | SYELTQPPSVSVSPGQTASITCSGDRLGEKYTSWYQQRP |
| | | GQSPLLVIYQDTKRPSGIPERFSGSNSGNTATLTISGTQA |
| | | MDEADYYCQAWESSTVVFGGGTKLTVLS |
| 151 | CDH19 65254.007 VL | SYELTQPPSVSVSPGQTASITCSGDRLGEKYTSWYQQRP |
| | with Cys clamp | GQSPLLVIYQDTKRPSGIPERFSGSNSGNTATLTISGTQA |
| | | MDEADYYCQAWESSTVVFGCGTKLTVL |
| 152 | Anti-CDH19 VH-VL | QVQLVESGGGVVQPGGSLRLSCAASGFTFSSYGMHWV |
| | | RQAPGKGLEWVAFIWYEGSNKYYAESVKDRFTISRDNS |
| | | KNTLYLQMNSLRAEDTAVYYCARRAGIIGTIGYYYGM |
| | | DVWGQGTTVTVSSGGGGSGGGGSGGGGSSYELTQPPS |
| | | VSVSPGQTASITCSGDRLGEKYTSWYQQRPGQSPLLVIY |
| | | QDTKRPSGIPERFSGSNSGNTATLTISGTQAMDEADYYC |
| | | QAWESSTVVFGGGTKLTVLS |
| 153 | CDH19 65254.007 | QVQLVESGGGVVQPGGSLRLSCAASGFTFSSYGMHWV |
| | scFv with cys clamp | RQAPGKCLEWVAFIWYEGSNKYYAESVKDRFTISRDNS |
| | | KNTLYLQMNSLRAEDTAVYYCARRAGIIGTIGYYYGM |
| | | DVWGQGTTVTVSSGGGGSGGGGSGGGGSSYELTQPPS |
| | | VSVSPGQTASITCSGDRLGEKYTSWYQQRPGQSPLLVIY |
| | | QDTKRPSGIPERFSGSNSGNTATLTISGTQAMDEADYYC |
| | | QAWESSTVVFGCGTKLTVL |
| 154 | Anti-CDH19 | QVQLVESGGGVVQPGGSLRLSCAASGFTFSSYGMHWV |
| | Bispecific molecule | RQAPGKGLEWVAFIWYEGSNKYYAESVKDRFTISRDNS |
| | | KNTLYLQMNSLRAEDTAVYYCARRAGIIGTIGYYYGM |
| | | DVWGQGTTVTVSSGGGGSGGGGSGGGGSSYELTQPPS |
| | | VSVSPGQTASITCSGDRLGEKYTSWYQQRPGQSPLLVIY |
| | | QDTKRPSGIPERFSGSNSGNTATLTISGTQAMDEADYYC |
| | | QAWESSTVVFGGGTKLTVLSGGGGSEVQLVESGGGLV |
| | | QPGGSLKLSCAASGFTFNKYAMNWVRQAPGKGLEWV |
| | | ARIRSKYNNYATYYADSVKDRFTISRDDSKNTAYLQMN |
| | | NLKTEDTAVYYCVRHGNFGNSYISYWAYWGQGTLVT |
| | | VSSGGGGSGGGGSGGGGSQTVVTQEPSLTVSPGGTVTL |
| | | TCGSSTGAVTSGNYPNWVQQKPGQAPRGLIGGTKFLAP |
| | | GTPARFSGSLLGGKAALTLSGVQPEDEAEYYCVLWYSN |
| | | RWVFGGGTKLTVLHHHHHH |
| 155 | CDH19 65254.007 | QVQLVESGGGVVQPGGSLRLSCAASGFTFSSYGMHWV |
| | Bispecific molecule | RQAPGKCLEWVAFIWYEGSNKYYAESVKDRFTISRDNS |
| | with cys clamp | KNTLYLQMNSLRAEDTAVYYCARRAGIIGTIGYYYGM |
| | | DVWGQGTTVTVSSGGGGSGGGGSGGGGSSYELTQPPS |
| | | VSVSPGQTASITCSGDRLGEKYTSWYQQRPGQSPLLVIY |
| | | QDTKRPSGIPERFSGSNSGNTATLTISGTQAMDEADYYC |
| | | QAWESSTVVFGCGTKLTVLSGGGGSEVQLVESGGGLV |
| | | QPGGSLKLSCAASGFTFNKYAMNWVRQAPGKGLEWV |
| | | ARIRSKYNNYATYYADSVKDRFTISRDDSKNTAYLQMN |
| | | NLKTEDTAVYYCVRHGNFGNSYISYWAYWGQGTLVT |
| | | VSSGGGGSGGGGSGGGGSQTVVTQEPSLTVSPGGTVTL |
| | | TCGSSTGAVTSGNYPNWVQQKPGQAPRGLIGGTKFLAP |
| | | GTPARFSGSLLGGKAALTLSGVQPEDEAEYYCVLWYSN |
| | | RWVFGGGTKLTVL |
| 156 | CDH19 65254.007 x | QVQLVESGGGVVQPGGSLRLSCAASGFTFSSYGMHWV |
| | I2C -scFc Bispecific | RQAPGKGLEWVAFIWYEGSNKYYAESVKDRFTISRDNS |
| | HLE molecule | KNTLYLQMNSLRAEDTAVYYCARRAGIIGTIGYYYGM |
| | | DVWGQGTTVTVSSGGGGSGGGGSGGGGSSYELTQPPS |
| | | VSVSPGQTASITCSGDRLGEKYTSWYQQRPGQSPLLVIY |
| | | QDTKRPSGIPERFSGSNSGNTATLTISGTQAMDEADYYC |
| | | QAWESSTVVFGGGTKLTVLSGGGGSEVQLVESGGGLV |
| | | QPGGSLKLSCAASGFTFNKYAMNWVRQAPGKGLEWV |
| | | ARIRSKYNNYATYYADSVKDRFTISRDDSKNTAYLQMN |
| | | NLKTEDTAVYYCVRHGNFGNSYISYWAYWGQGTLVT |
| | | VSSGGGGSGGGGSGGGGSQTVVTQEPSLTVSPGGTVTL |
| | | TCGSSTGAVTSGNYPNWVQQKPGQAPRGLIGGTKFLAP |
| | | GTPARFSGSLLGGKAALTLSGVQPEDEAEYYCVLWYSN |
| | | RWVFGGGTKLTVLGGGGDKTHTCPPCPAPELLGGPSVF |
| | | LFPPKPKDTLMISRTPEVTCVVVDVSHEDPEVKFNWYV |
| | | DGVEVHNAKTKPCEEQYGSTYRCVSVLTVLHQDWLNG |
| | | KEYKCKVSNKALPAPIEKTISKAKGQPREPQVYTLPPSR |
| | | EEMTKNQVSLTCLVKGFYPSDIAVEWESNGQPENNYKT |
| | | TPPVLDSDGSFFLYSKLTVDKSRWQQGNVFSCSVMHEA |
| | | LHNHYTQKSLSLSPGKGGGGSGGGGSGGGGSGGGGSG |
| | | GGGSGGGGSDKTHTCPPCPAPELLGGPSVFLFPPKPKDT |
| | | LMISRTPEVTCVVVDVSHEDPEVKFNWYVDGVEVHNA |
| | | KTKPCEEQYGSTYRCVSVLTVLHQDWLNGKEYKCKVS |
| | | NKALPAPIEKTISKAKGQPREPQVYTLPPSREEMTKNQV |
| | | SLTCLVKGFYPSDIAVEWESNGQPENNYKTTPPVLDSD |
| | | GSFFLYSKLTVDKSRWQQGNVFSCSVMHEALHNHYTQ |
| | | KSLSLSPGK |
| 157 | CDH19 65254.007 x | QVQLVESGGGVVQPGGSLRLSCAASGFTFSSYGMHWV |
| | I2C -scFc_ Bispecific | RQAPGKGLEWVAFIWYEGSNKYYAESVKDRFTISRDNS |
| | HLE molecule | KNTLYLQMNSLRAEDTAVYYCARRAGIIGTIGYYYGM |
| | | DVWGQGTTVTVSSGGGGSGGGGSGGGGSSYELTQPPS |
| | | VSVSPGQTASITCSGDRLGEKYTSWYQQRPGQSPLLVIY |
| | | QDTKRPSGIPERFSGSNSGNTATLTISGTQAMDEADYYC |
| | | QAWESSTVVFGGGTKLTVLSGGGGSEVQLVESGGGLV |
| | | QPGGSLKLSCAASGFTFNKYAMNWVRQAPGKGLEWV |
| | | ARIRSKYNNYATYYADSVKDRFTISRDDSKNTAYLQMN |
| | | NLKTEDTAVYYCVRHGNFGNSYISYWAYWGQGTLVT |
| | | VSSGGGGSGGGGSGGGGSQTVVTQEPSLTVSPGGTVTL |
| | | TCGSSTGAVTSGNYPNWVQQKPGQAPRGLIGGTKFLAP |
| | | GTPARFSGSLLGGKAALTLSGVQPEDEAEYYCVLWYSN |
| | | RWVFGGGTKLTVLGGGGDKTHTCPPCPAPELLGGPSVF |
| | | LFPPKPKDTLMISRTPEVTCVVVDVSHEDPEVKFNWYV |
| | | DGVEVHNAKTKPCEEQYGSTYRCVSVLTVLHQDWLNG |
| | | KEYKCKVSNKALPAPIEKTISKAKGQPREPQVYTLPPSR |
| | | EEMTKNQVSLTCLVKGFYPSDIAVEWESNGQPENNYKT |
| | | TPPVLDSDGSFFLYSKLTVDKSRWQQGNVFSCSVMHEA |
| | | LHNHYTQKSLSLSPGGGGSGGGGSGGGGSGGGGSGGG |
| | | GSGGGGSDKTHTCPPCPAPELLGGPSVFLFPPKPKDTLM |
| | | ISRTPEVTCVVVDVSHEDPEVKFNWYVDGVEVHNAKT |
| | | KPCEEQYGSTYRCVSVLTVLHQDWLNGKEYKCKVSNK |
| | | ALPAPIEKTISKAKGQPREPQVYTLPPSREEMTKNQVSL |
| | | TCLVKGFYPSDIAVEWESNGQPENNYKTTPPVLDSDGS |
| | | FFLYSKLTVDKSRWQQGNVFSCSVMHEALHNHYTQKS |
| | | LSLSPGK |
| 158 | CDH19 65254.007 x | QVQLVESGGGVVQPGGSLRLSCAASGFTFSSYGMHWV |
| | I2C -scFc Bispecific | RQAPGKCLEWVAFIWYEGSNKYYAESVKDRFTISRDNS |
| | HLE molecule with cys | KNTLYLQMNSLRAEDTAVYYCARRAGIIGTIGYYYGM |
| | clamp | DVWGQGTTVTVSSGGGGSGGGGSGGGGSSYELTQPPS |
| | | VSVSPGQTASITCSGDRLGEKYTSWYQQRPGQSPLLVIY |
| | | QDTKRPSGIPERFSGSNSGNTATLTISGTQAMDEADYYC |
| | | QAWESSTVVFGCGTKLTVLSGGGGSEVQLVESGGGLV |
| | | QPGGSLKLSCAASGFTFNKYAMNWVRQAPGKGLEWV |
| | | ARIRSKYNNYATYYADSVKDRFTISRDDSKNTAYLQMN |
| | | NLKTEDTAVYYCVRHGNFGNSYISYWAYWGQGTLVT |
| | | VSSGGGGSGGGGSGGGGSQTVVTQEPSLTVSPGGTVTL |
| | | TCGSSTGAVTSGNYPNWVQQKPGQAPRGLIGGTKFLAP |
| | | GTPARFSGSLLGGKAALTLSGVQPEDEAEYYCVLWYSN |
| | | RWVFGGGTKLTVLGGGGDKTHTCPPCPAPELLGGPSVF |
| | | LFPPKPKDTLMISRTPEVTCVVVDVSHEDPEVKFNWYV |
| | | DGVEVHNAKTKPCEEQYGSTYRCVSVLTVLHQDWLNG |
| | | KEYKCKVSNKALPAPIEKTISKAKGQPREPQVYTLPPSR |
| | | EEMTKNQVSLTCLVKGFYPSDIAVEWESNGQPENNYKT |
| | | TPPVLDSDGSFFLYSKLTVDKSRWQQGNVFSCSVMHEA |
| | | LHNHYTQKSLSLSPGKGGGGSGGGGSGGGGSGGGGSG |
| | | GGGSGGGGSDKTHTCPPCPAPELLGGPSVFLFPPKPKDT |
| | | LMISRTPEVTCVVVDVSHEDPEVKFNWYVDGVEVHNA |
| | | KTKPCEEQYGSTYRCVSVLTVLHQDWLNGKEYKCKVS |
| | | NKALPAPIEKTISKAKGQPREPQVYTLPPSREEMTKNQV |
| | | SLTCLVKGFYPSDIAVEWESNGQPENNYKTTPPVLDSD |
| | | GSFFLYSKLTVDKSRWQQGNVFSCSVMHEALHNHYTQ |
| | | KSLSLSPGK |
| 159 | CDH19 65254.007 x | QVQLVESGGGVVQPGGSLRLSCAASGFTFSSYGMHWV |
| | I2C -scFc_delGK | RQAPGKCLEWVAFIWYEGSNKYYAESVKDRFTISRDNS |
| | Bispecific HLE | KNTLYLQMNSLRAEDTAVYYCARRAGIIGTIGYYYGM |
| | molecule with cys | DVWGQGTTVTVSSGGGGSGGGGSGGGGSSYELTQPPS |
| | clamp | VSVSPGQTASITCSGDRLGEKYTSWYQQRPGQSPLLVIY |
| | | QDTKRPSGIPERFSGSNSGNTATLTISGTQAMDEADYYC |
| | | QAWESSTVVFGCGTKLTVLSGGGGSEVQLVESGGGLV |
| | | QPGGSLKLSCAASGFTFNKYAMNWVRQAPGKGLEWV |
| | | ARIRSKYNNYATYYADSVKDRFTISRDDSKNTAYLQMN |
| | | NLKTEDTAVYYCVRHGNFGNSYISYWAYWGQGTLVT |
| | | VSSGGGGSGGGGSGGGGSQTVVTQEPSLTVSPGGTVTL |
| | | TCGSSTGAVTSGNYPNWVQQKPGQAPRGLIGGTKFLAP |
| | | GTPARFSGSLLGGKAALTLSGVQPEDEAEYYCVLWYSN |
| | | RWVFGGGTKLTVLGGGGDKTHTCPPCPAPELLGGPSVF |
| | | LFPPKPKDTLMISRTPEVTCVVVDVSHEDPEVKFNWYV |
| | | DGVEVHNAKTKPCEEQYGSTYRCVSVLTVLHQDWLNG |
| | | KEYKCKVSNKALPAPIEKTISKAKGQPREPQVYTLPPSR |
| | | EEMTKNQVSLTCLVKGFYPSDIAVEWESNGQPENNYKT |
| | | TPPVLDSDGSFFLYSKLTVDKSRWQQGNVFSCSVMHEA |
| | | LHNHYTQKSLSLSPGGGGSGGGGSGGGGSGGGGSGGG |
| | | GSGGGGSDKTHTCPPCPAPELLGGPSVFLFPPKPKDTLM |
| | | ISRTPEVTCVVVDVSHEDPEVKFNWYVDGVEVHNAKT |
| | | KPCEEQYGSTYRCVSVLTVLHQDWLNGKEYKCKVSNK |
| | | ALPAPIEKTISKAKGQPREPQVYTLPPSREEMTKNQVSL |
| | | TCLVKGFYPSDIAVEWESNGQPENNYKTTPPVLDSDGS |
| | | FFLYSKLTVDKSRWQQGNVFSCSVMHEALHNHYTQKS |
| | | LSLSPGK |

FLT3

| | | |
|---|---|---|
| 160 | Anti-FLT3 CDR-H1 | NARMGVS |
| 161 | Anti-FLT3 CDR-H2 | HIFSNDEKSYSTSLKN |
| 162 | Anti-FLT3 CDR-H3 | IVGYGSGWYGFFDY |
| 163 | Anti-FLT3 CDR-L1 | RASQGIRNDLG |
| 164 | Anti-FLT3 CDR-L2 | AASTLQS |
| 165 | Anti-FLT3 CDR-L3 | LQHNSYPLT |
| 166 | Anti-FLT3 VH | QVTLKESGPTLVKPTETLTLTCTLSGFSLNNARMGVSWI |
| | | RQPPGKCLEWLAHIFSNDEKSYSTSLKNRLTISKDSSKT |
| | | QVVLTMTNVDPVDTATYYCARIVGYGSGWYGFFDYW |
| | | GQGTLVTVSS |
| 167 | Anti-FLT3 VL | DIQMTQSPSSLSASVGDRVTITCRASQGIRNDLGWYQQ |
| | | KPGKAPKRLIYAASTLQSGVPSRFSGSGSGTEFTLTISSL |
| | | QPEDFATYYCLQHNSYPLTFGCGTKVEIK |
| 168 | Anti-FLT3 VH-VL | QVTLKESGPTLVKPTETLTLTCTLSGFSLNNARMGVSWI |
| | | RQPPGKCLEWLAHIFSNDEKSYSTSLKNRLTISKDSSKT |
| | | QVVLTMTNVDPVDTATYYCARIVGYGSGWYGFFDYW |
| | | GQGTLVTVSSGGGGSGGGGSGGGGSDIQMTQSPSSLSA |
| | | SVGDRVTITCRASQGIRNDLGWYQQKPGKAPKRLIYAA |
| | | STLQSGVPSRFSGSGSGTEFTLTISSLQPEDFATYYCLQH |
| | | NSYPLTFGCGTKVEIK |
| 169 | FLT3_7 A8xCD3 | QVTLKESGPTLVKPTETLTLTCTLSGFSLNNARMGVSWI |
| | Bispecific molecule | RQPPGKCLEWLAHIFSNDEKSYSTSLKNRLTISKDSSKT |
| | | QVVLTMTNVDPVDTATYYCARIVGYGSGWYGFFDYW |
| | | GQGTLVTVSSGGGGSGGGGSGGGGSDIQMTQSPSSLSA |
| | | SVGDRVTITCRASQGIRNDLGWYQQKPGKAPKRLIYAA |
| | | STLQSGVPSRFSGSGSGTEFTLTISSLQPEDFATYYCLQH |
| | | NSYPLTFGCGTKVEIKSGGGGSEVQLVESGGGLVQPGG |
| | | SLKLSCAASGFTFNKYAMNWVRQAPGKGLEWVARIRS |
| | | KYNNYATYYADSVKDRFTISRDDSKNTAYLQMNNLKT |
| | | EDTAVYYCVRHGNFGNSYISYWAYWGQGTLVTVSSGG |
| | | GGSGGGGSGGGGSQTVVTQEPSLTVSPGGTVTLTCGSS |
| | | TGAVTSGNYPNWVQQKPGQAPRGLIGGTKFLAPGTPAR |
| | | FSGSLLGGKAALTLSGVQPEDEAEYYCVLWYSNRWVF |
| | | GGGTKLTVL |
| 170 | FLT3_7 A8xCD3-scFc | QVTLKESGPTLVKPTETLTLTCTLSGFSLNNARMGVSWI |
| | Bispecific HLE | RQPPGKCLEWLAHIFSNDEKSYSTSLKNRLTISKDSSKT |
| | molecule | QVVLTMTNVDPVDTATYYCARIVGYGSGWYGFFDYW |
| | | GQGTLVTVSSGGGGSGGGGSGGGGSDIQMTQSPSSLSA |
| | | SVGDRVTITCRASQGIRNDLGWYQQKPGKAPKRLIYAA |
| | | STLQSGVPSRFSGSGSGTEFTLTISSLQPEDFATYYCLQH |
| | | NSYPLTFGCGTKVEIKSGGGGSEVQLVESGGGLVQPGG |
| | | SLKLSCAASGFTFNKYAMNWVRQAPGKGLEWVARIRS |
| | | KYNNYATYYADSVKDRFTISRDDSKNTAYLQMNNLKT |
| | | EDTAVYYCVRHGNFGNSYISYWAYWGQGTLVTVSSGG |
| | | GGSGGGGSGGGGSQTVVTQEPSLTVSPGGTVTLTCGSS |
| | | TGAVTSGNYPNWVQQKPGQAPRGLIGGTKFLAPGTPAR |
| | | FSGSLLGGKAALTLSGVQPEDEAEYYCVLWYSNRWVF |
| | | GGGTKLTVLGGGGDKTHTCPPCPAPELLGGPSVFLFPPK |
| | | PKDTLMISRTPEVTCVVVDVSHEDPEVKFNWYVDGVE |
| | | VHNAKTKPCEEQYGSTYRCVSVLTVLHQDWLNGKEYK |
| | | CKVSNKALPAPIEKTISKAKGQPREPQVYTLPPSREEMT |
| | | KNQVSLTCLVKGFYPSDIAVEWESNGQPENNYKTTPPV |
| | | LDSDGSFFLYSKLTVDKSRWQQGNVFSCSVMHEALHN |
| | | HYTQKSLSLSPGKGGGGSGGGGSGGGGSGGGGSGGGG |
| | | SGGGGSDKTHTCPPCPAPELLGGPSVFLFPPKPKDTLMIS |
| | | RTPEVTCVVVDVSHEDPEVKFNWYVDGVEVHNAKTKP |
| | | CEEQYGSTYRCVSVLTVLHQDWLNGKEYKCKVSNKAL |
| | | PAPIEKTISKAKGQPREPQVYTLPPSREEMTKNQVSLTC |
| | | LVKGFYPSDIAVEWESNGQPENNYKTTPPVLDSDGSFFL |
| | | YSKLTVDKSRWQQGNVFSCSVMHEALHNHYTQKSLSL |
| | | SPGK |

ANTI-DLL3

| | | |
|---|---|---|
| 171 | Anti-DLL3 HCDR1 | SYYWS |
| 172 | Anti-DLL3 HCDR2 | YVYYSGTTNYNPSLKS |
| 173 | Anti-DLL3 HCDR3 | IAVTGFYFDY |
| 174 | Anti-DLL3 LCDR1 | RASQRVNNNYLA |
| 175 | Anti-DLL3 LCDR2 | GASSRAT |
| 176 | Anti-DLL3 LCDR3 | QQYDRSPLT |
| 177 | Anti-DLL3 VH with | QVQLQESGPGLVKPSETLSLTCTVSGGSISSYYWSWIRQ |
| | cys-clamp | PPGKCLEWIGYVYYSGTTNYNPSLKSRVTISVDTSKNQF |
| | | SLKLSSVTAADTAVYYCASIAVTGFYFDYWGQGTLVTV |
| | | SS |
| 178 | Anti-DLL3 VL with | EIVLTQSPGTLSLSPGERVTLSCRASQRVNNNYLAWYQ |
| | cys-clamp | QRPGQAPRLLIYGASSRATGIPDRFSGSGSGTDFTLTISR |
| | | LEPEDFAVYYCQQYDRSPLTFGCGTKLEIK |
| 179 | Anti-DLL3 VH-VL | QVQLQESGPGLVKPSETLSLTCTVSGGSISSYYWSWIRQ |
| | with cys-clamp | PPGKCLEWIGYVYYSGTTNYNPSLKSRVTISVDTSKNQF |
| | | SLKLSSVTAADTAVYYCASIAVTGFYFDYWGQGTLVTV |
| | | SSGGGGSGGGGSGGGGSEIVLTQSPGTLSLSPGERVTLS |
| | | CRASQRVNNNYLAWYQQRPGQAPRLLIYGASSRATGIP |
| | | DRFSGSGSGTDFTLTISRLEPEDFAVYYCQQYDRSPLTF |
| | | GCGTKLEIK |
| 180 | DLL3_1_CCxCD3 | QVQLQESGPGLVKPSETLSLTCTVSGGSISSYYWSWIRQ |
| | Bispecific molecule | PPGKCLEWIGYVYYSGTTNYNPSLKSRVTISVDTSKNQF |
| | | SLKLSSVTAADTAVYYCASIAVTGFYFDYWGQGTLVTV |
| | | SSGGGGSGGGGSGGGGSEIVLTQSPGTLSLSPGERVTLS |
| | | CRASQRVNNNYLAWYQQRPGQAPRLLIYGASSRATGIP |
| | | DRFSGSGSGTDFTLTISRLEPEDFAVYYCQQYDRSPLTF |
| | | GCGTKLEIKSGGGGSEVQLVESGGGLVQPGGSLKLSCA |
| | | ASGFTFNKYAMNWVRQAPGKGLEWVARIRSKYNNYA |
| | | TYYADSVKDRFTISRDDSKNTAYLQMNNLKTEDTAVY |
| | | YCVRHGNFGNSYISYWAYWGQGTLVTVSSGGGGSGGG |
| | | GSGGGGSQTVVTQEPSLTVSPGGTVTLTCGSSTGAVTS |
| | | GNYPNWVQQKPGQAPRGLIGGTKFLAPGTPARFSGSLL |
| | | GGKAALTLSGVQPEDEAEYYCVLWYSNRWVFGGGTK |
| | | LTVL |
| 181 | DLL3_1_CCxCD3- | QVQLQESGPGLVKPSETLSLTCTVSGGSISSYYWSWIRQ |
| | scFc_ Bispecific HLE | PPGKCLEWIGYVYYSGTTNYNPSLKSRVTISVDTSKNQF |
| | molecule | SLKLSSVTAADTAVYYCASIAVTGFYFDYWGQGTLVTV |
| | | SSGGGGSGGGGSGGGGSEIVLTQSPGTLSLSPGERVTLS |
| | | CRASQRVNNNYLAWYQQRPGQAPRLLIYGASSRATGIP |
| | | DRFSGSGSGTDFTLTISRLEPEDFAVYYCQQYDRSPLTF |
| | | GCGTKLEIKSGGGGSEVQLVESGGGLVQPGGSLKLSCA |
| | | ASGFTFNKYAMNWVRQAPGKGLEWVARIRSKYNNYA |
| | | TYYADSVKDRFTISRDDSKNTAYLQMNNLKTEDTAVY |
| | | YCVRHGNFGNSYISYWAYWGQGTLVTVSSGGGGSGGG |
| | | GSGGGGSQTVVTQEPSLTVSPGGTVTLTCGSSTGAVTS |
| | | GNYPNWVQQKPGQAPRGLIGGTKFLAPGTPARFSGSLL |
| | | GGKAALTLSGVQPEDEAEYYCVLWYSNRWVFGGGTK |
| | | LTVLGGGGDKTHTCPPCPAPELLGGPSVFLFPPKPKDTL |
| | | MISRTPEVTCVVVDVSHEDPEVKFNWYVDGVEVHNAK |
| | | TKPCEEQYGSTYRCVSVLTVLHQDWLNGKEYKCKVSN |
| | | KALPAPIEKTISKAKGQPREPQVYTLPPSREEMTKNQVS |
| | | LTCLVKGFYPSDIAVEWESNGQPENNYKTTPPVLDSDG |
| | | SFFLYSKLTVDKSRWQQGNVFSCSVMHEALHNHYTQK |
| | | SLSLSPGGGGSGGGGSGGGGSGGGGSGGGGSGGGGSD |
| | | KTHTCPPCPAPELLGGPSVFLFPPKPKDTLMISRTPEVTC |
| | | VVVDVSHEDPEVKFNWYVDGVEVHNAKTKPCEEQYG |
| | | STYRCVSVLTVLHQDWLNGKEYKCKVSNKALPAPIEKT |
| | | ISKAKGQPREPQVYTLPPSREEMTKNQVSLTCLVKGFYP |
| | | SDIAVEWESNGQPENNYKTTPPVLDSDGSFFLYSKLTVD |
| | | KSRWQQGNVFSCSVMHEALHNHYTQKSLSLSPGK |

ANTI-CD19

| | | |
|---|---|---|
| 182 | Anti-CD19 CDR-H1 | SYGMH |
| | (97-G1RE-C2) | |
| 183 | Anti-CD19 CDR-H2 | VISYEGSNKYYAESVKG |
| 184 | Anti-CD19 CDR-H3 | DRGTIFGNYGLEV |
| 185 | Anti-CD19 CDR-L1 | RSSQSLLHKNAFNYLD |
| 186 | Anti-CD19 CDR-L2 | LGSNRAS |
| 187 | Anti-CD19 CDR-L3 | MQALQTPFT |
| 188 | Anti-CD19 VH | QVQLVESGGGVVQPGRSLRLSCAASGFTFSSYGMHWV |
| | | RQAPGKCLEWVAVISYEGSNKYYAESVKGRFTISRDNS |
| | | KNTLYLQMNSLRDEDTAVYYCARDRGTIFGNYGLEVW |
| | | GQGTTVTVSS |
| 189 | Anti-CD19 VL | DIVMTQSPLSLPVISGEPASISCRSSQSLLHKNAFNYLDW |
| | | YLQKPGQSPQLLIYLGSNRASGVPDRFSGSGSGTDFTLK |
| | | ISRVEAEDVGVYYCMQALQTPFTFGCGTKVDIK |
| 190 | Anti-CD19 VL-VH | DIVMTQSPLSLPVISGEPASISCRSSQSLLHKNAFNYLDW |
| | | YLQKPGQSPQLLIYLGSNRASGVPDRFSGSGSGTDFTLK |
| | | ISRVEAEDVGVYYCMQALQTPFTFGCGTKVDIKGGGGS |
| | | GGGGSGGGGSQVQLVESGGGVVQPGRSLRLSCAASGF |
| | | TFSSYGMHWVRQAPGKCLEWVAVISYEGSNKYYAESV |
| | | KGRFTISRDNSKNTLYLQMNSLRDEDTAVYYCARDRGT |
| | | IFGNYGLEVWGQGTTVTVSSGGGGSEVQLVESGGGLV |
| | | QPGGSLKLSCAASGFTFNKYAMNWVRQAPGKGLEWV |
| | | ARIRSKYNNYATYYADSVKDRFTISRDDSKNTAYLQMN |
| | | NLKTEDTAVYYCVRHGNFGNSYISYWAYWGQGTLVT |
| | | VSSGGGGSGGGGSGGGGSQTVVTQEPSLTVSPGGTVTL |
| | | TCGSSTGAVTSGNYPNWVQQKPGQAPRGLIGGTKFLAP |
| | | GTPARFSGSLLGGKAALTLSGVQPEDEAEYYCVLWYSN |
| | | RWVFGGGTKLTVL |
| 191 | CD19 97-G1RE-C2 CC | DIVMTQSPLSLPVISGEPASISCRSSQSLLHKNAFNYLDW |
| | x I2C-scFc | YLQKPGQSPQLLIYLGSNRASGVPDRFSGSGSGTDFTLK |
| | | ISRVEAEDVGVYYCMQALQTPFTFGCGTKVDIKGGGGS |
| | | GGGGSGGGGSQVQLVESGGGVVQPGRSLRLSCAASGF |
| | | TFSSYGMHWVRQAPGKCLEWVAVISYEGSNKYYAESV |
| | | KGRFTISRDNSKNTLYLQMNSLRDEDTAVYYCARDRGT |
| | | IFGNYGLEVWGQGTTVTVSSGGGGSEVQLVESGGGLV |
| | | QPGGSLKLSCAASGFTFNKYAMNWVRQAPGKGLEWV |
| | | ARIRSKYNNYATYYADSVKDRFTISRDDSKNTAYLQMN |
| | | NLKTEDTAVYYCVRHGNFGNSYISYWAYWGQGTLVT |
| | | VSSGGGGSGGGGSGGGGSQTVVTQEPSLTVSPGGTVTL |
| | | TCGSSTGAVTSGNYPNWVQQKPGQAPRGLIGGTKFLAP |
| | | GTPARFSGSLLGGKAALTLSGVQPEDEAEYYCVLWYSN |
| | | RWVFGGGTKLTVLGGGGDKTHTCPPCPAPELLGGPSVF |
| | | LFPPKPKDTLMISRTPEVTCVVVDVSHEDPEVKFNWYV |
| | | DGVEVHNAKTKPCEEQYGSTYRCVSVLTVLHQDWLNG |
| | | KEYKCKVSNKALPAPIEKTISKAKGQPREPQVYTLPPSR |
| | | EEMTKNQVSLTCLVKGFYPSDIAVEWESNGQPENNYKT |
| | | TPPVLDSDGSFFLYSKLTVDKSRWQQGNVFSCSVMHEA |
| | | LHNHYTQKSLSLSPGKGGGGSGGGGSGGGGSGGGGSG |
| | | GGGSGGGGSDKTHTCPPCPAPELLGGPSVFLFPPKPKDT |
| | | LMISRTPEVTCVVVDVSHEDPEVKFNWYVDGVEVHNA |
| | | KTKPCEEQYGSTYRCVSVLTVLHQDWLNGKEYKCKVS |
| | | NKALPAPIEKTISKAKGQPREPQVYTLPPSREEMTKNQV |
| | | SLTCLVKGFYPSDIAVEWESNGQPENNYKTTPPVLDSD |
| | | GSFFLYSKLTVDKSRWQQGNVFSCSVMHEALHNHYTQ |
| | | KSLSLSPGK |

BCMA

| | | |
|---|---|---|
| 192 | Anti-BCMA CDR-H1 | NHIIH |
| | (27-C4-G7) | |
| 193 | Anti-BCMA CDR-H2 | YINPYPGYHAYNEKFQG |
| 194 | Anti-BCMA CDR-H3 | DGYYRDTDVLDY |
| 195 | Anti-BCMA CDR-L1 | QASQDISNYLN |
| 196 | Anti-BCMA CDR-L2 | YTSRLHT |
| 197 | Anti-BCMA CDR-L3 | QQGNTLPWT |
| 198 | Anti-BCMA VH | QVQLVQSGAEVKKPGASVKVSCKASGYTFTNHIIHWVR |
| | | QAPGQCLEWMGYINPYPGYHAYNEKFQGRATMTSDTS |
| | | TSTVYMELSSLRSEDTAVYYCARDGYYRDTDVLDYWG |
| | | QGTLVTVSS |
| 199 | Anti-BCMA VL | DIQMTQSPSSLSASVGDRVTITCQASQDISNYLNWYQQ |
| | | KPGKAPKLLIYYTSRLHTGVPSRFSGSGSGTDFTFTISSL |
| | | EPEDIATYYCQQGNTLPWTFGCGTKLEIK |
| 200 | Anti-BCMA VH-VL | QVQLVQSGAEVKKPGASVKVSCKASGYTFTNHIIHWVR |
| | | QAPGQCLEWMGYINPYPGYHAYNEKFQGRATMTSDTS |
| | | TSTVYMELSSLRSEDTAVYYCARDGYYRDTDVLDYWG |
| | | QGTLVTVSSGGGGSGGGGSGGGGSDIQMTQSPSSLSAS |
| | | VGDRVTITCQASQDISNYLNWYQQKPGKAPKLLIYYTS |
| | | RLHTGVPSRFSGSGSGTDFTFTISSLEPEDIATYYCQQGN |
| | | TLPWTFGCGTKLEIK |
| 201 | Anti-BCMA Ic320 | QVQLVQSGAEVKKPGASVKVSCKASGYTFTNHIIHWVR |
| | bispecific molecule | QAPGQCLEWMGYINPYPGYHAYNEKFQGRATMTSDTS |
| | HLE | TSTVYMELSSLRSEDTAVYYCARDGYYRDTDVLDYWG |
| | With cys-clamp | QGTLVTVSSGGGGSGGGGSGGGGSDIQMTQSPSSLSAS |
| | | VGDRVTITCQASQDISNYLNWYQQKPGKAPKLLIYYTS |
| | | RLHTGVPSRFSGSGSGTDFTFTISSLEPEDIATYYCQQGN |
| | | TLPWTFGCGTKLEIKSGGGGSEVQLVESGGGLVQPGGS |
| | | LKLSCAASGFTFNKYAMNWVRQAPGKGLEWVARIRSK |
| | | YNNYATYYADSVKDRFTISRDDSKNTAYLQMNNLKTE |
| | | DTAVYYCVRHGNFGNSYISYWAYWGQGTLVTVSSGG |
| | | GGSGGGGSGGGGSQTVVTQEPSLTVSPGGTVTLTCGSS |
| | | TGAVTSGNYPNWVQQKPGQAPRGLIGGTKFLAPGTPAR |
| | | FSGSLLGGKAALTLSGVQPEDEAEYYCVLWYSNRWVF |
| | | GGGTKLTVLGGGGDKTHTCPPCPAPELLGGPSVFLFPPK |
| | | PKDTLMISRTPEVTCVVVDVSHEDPEVKFNWYVDGVE |
| | | VHNAKTKPCEEQYGSTYRCVSVLTVLHQDWLNGKEYK |
| | | CKVSNKALPAPIEKTISKAKGQPREPQVYTLPPSREEMT |
| | | KNQVSLTCLVKGFYPSDIAVEWESNGQPENNYKTTPPV |
| | | LDSDGSFFLYSKLTVDKSRWQQGNVFSCSVMHEALHN |
| | | HYTQKSLSLSPGKGGGGSGGGGSGGGGSGGGGSGGGG |
| | | SGGGGSDKTHTCPPCPAPELLGGPSVFLFPPKPKDTLMIS |
| | | RTPEVTCVVVDVSHEDPEVKFNWYVDGVEVHNAKTKP |
| | | CEEQYGSTYRCVSVLTVLHQDWLNGKEYKCKVSNKAL |
| | | PAPIEKTISKAKGQPREPQVYTLPPSREEMTKNQVSLTC |
| | | LVKGFYPSDIAVEWESNGQPENNYKTTPPVLDSDGSFFL |
| | | YSKLTVDKSRWQQGNVFSCSVMHEALHNHYTQKSLSL |
| | | SPGK |
| 202 | Anti-BCMA IC20 | QVQLVQSGAEVKKPGASVKVSCKASGYTFTNHIIHWVR |
| | bispecific molecule | QAPGQCLEWMGYINPYPGYHAYNEKFQGRATMTSDTS |
| | With cys-clamp | TSTVYMELSSLRSEDTAVYYCARDGYYRDTDVLDYWG |
| | | QGTLVTVSSGGGGSGGGGSGGGGSDIQMTQSPSSLSAS |
| | | VGDRVTITCQASQDISNYLNWYQQKPGKAPKLLIYYTS |
| | | RLHTGVPSRFSGSGSGTDFTFTISSLEPEDIATYYCQQGN |
| | | TLPWTFGCGTKLEIKSGGGGSEVQLVESGGGLVQPGGS |
| | | LKLSCAASGFTFNKYAMNWVRQAPGKGLEWVARIRSK |
| | | YNNYATYYADSVKDRFTISRDDSKNTAYLQMNNLKTE |
| | | DTAVYYCVRHGNFGNSYISYWAYWGQGTLVTVSSGG |
| | | GGSGGGGSGGGGSQTVVTQEPSLTVSPGGTVTLTCGSS |
| | | TGAVTSGNYPNWVQQKPGQAPRGLIGGTKFLAPGTPAR |
| | | FSGSLLGGKAALTLSGVQPEDEAEYYCVLWYSNRWVF |
| | | GGGTKLTVLHHHHHH |

PSMA

| | | |
|---|---|---|
| 203 | Anti-PSMA CDR-H1 | DYYMY |
| | PM76-B10.17 | |
| 204 | Anti-PSMA CDR-H2 | IISDAGYYTYYSDIIKG |
| 205 | Anti-PSMA CDR-H3 | GFPLLRHGAMDY |
| 206 | Anti-PSMA CDR-L1 | KASQNVDANVA |
| 207 | Anti-PSMA CDR-L2 | SASYVYW |
| 208 | Anti-PSMA CDR-L3 | QQYDQQLIT |
| 209 | Anti-PSMA VH with | QVQLVESGGGLVKPGESLRLSCAASGFTFSDYYMYWV |
| | cys-clamp | RQAPGKCLEWVAIISDAGYYTYYSDIIKGRFTISRDNAK |
| | PM76-B10.17 | NSLYLQMNSLKAEDTAVYYCARGFPLLRHGAMDYWG |
| | | QGTLVTVSS |
| 210 | Anti-PSMA VL with | DIQMTQSPSSLSASVGDRVTITCKASQNVDANVAWYQQ |
| | cys-clamp | KPGQAPKSLIYSASYVYWDVPSRFSGSASGTDFTLTISS |
| | PM76-B10.17 | VQSEDFATYYCQQYDQQLITFGCGTKLEIK |
| 211 | Anti-PSMA VH-VL | QVQLVESGGGLVKPGESLRLSCAASGFTFSDYYMYWV |
| | with cys-clamp | RQAPGKCLEWVAIISDAGYYTYYSDIIKGRFTISRDNAK |
| | PM76-B10.17 | NSLYLQMNSLKAEDTAVYYCARGFPLLRHGAMDYWG |
| | | QGTLVTVSSGGGGSGGGGSGGGGSDIQMTQSPSSLSAS |
| | | VGDRVTITCKASQNVDANVAWYQQKPGQAPKSLIYSA |
| | | SYVYWDVPSRFSGSASGTDFTLTISSVQSEDFATYYCQQ |
| | | YDQQLITFGCGTKLEIK |
| 212 | Anti-PSMA x CD3 | QVQLVESGGGLVKPGESLRLSCAASGFTFSDYYMYWV |
| | bispecific molecule | RQAPGKCLEWVAIISDAGYYTYYSDIIKGRFTISRDNAK |
| | with cys-clamp | NSLYLQMNSLKAEDTAVYYCARGFPLLRHGAMDYWG |
| | PM76-B10.17 | QGTLVTVSSGGGGSGGGGSGGGGSDIQMTQSPSSLSAS |
| | | VGDRVTITCKASQNVDANVAWYQQKPGQAPKSLIYSA |
| | | SYVYWDVPSRFSGSASGTDFTLTISSVQSEDFATYYCQQ |
| | | YDQQLITFGCGTKLEIKSGGGGSEVQLVESGGGLVQPG |
| | | GSLKLSCAASGFTFNKYAMNWVRQAPGKGLEWVARIR |
| | | SKYNNYATYYADSVKDRFTISRDDSKNTAYLQMNNLK |
| | | TEDTAVYYCVRHGNFGNSYISYWAYWGQGTLVTVSSG |
| | | GGGSGGGGSGGGGSQTVVTQEPSLTVSPGGTVTLTCGS |
| | | STGAVTSGNYPNWVQQKPGQAPRGLIGGTKFLAPGTPA |
| | | RFSGSLLGGKAALTLSGVQPEDEAEYYCVLWYSNRWV |
| | | FGGGTKLTVL |
| 213 | Anti-PSMA x CD3 - | QVQLVESGGGLVKPGESLRLSCAASGFTFSDYYMYWV |
| | scFc bispecific | RQAPGKCLEWVAIISDAGYYTYYSDIIKGRFTISRDNAK |
| | molecule | NSLYLQMNSLKAEDTAVYYCARGFPLLRHGAMDYWG |
| | HLE | QGTLVTVSSGGGGSGGGGSGGGGSDIQMTQSPSSLSAS |
| | PM76-B10.17 | VGDRVTITCKASQNVDANVAWYQQKPGQAPKSLIYSA |
| | | SYVYWDVPSRFSGSASGTDFTLTISSVQSEDFATYYCQQ |
| | | YDQQLITFGCGTKLEIKSGGGGSEVQLVESGGGLVQPG |
| | | GSLKLSCAASGFTFNKYAMNWVRQAPGKGLEWVARIR |
| | | SKYNNYATYYADSVKDRFTISRDDSKNTAYLQMNNLK |
| | | TEDTAVYYCVRHGNFGNSYISYWAYWGQGTLVTVSSG |
| | | GGGSGGGGSGGGGSQTVVTQEPSLTVSPGGTVTLTCGS |
| | | STGAVTSGNYPNWVQQKPGQAPRGLIGGTKFLAPGTPA |
| | | RFSGSLLGGKAALTLSGVQPEDEAEYYCVLWYSNRWV |
| | | FGGGTKLTVLGGGGDKTHTCPPCPAPELLGGPSVFLFPP |
| | | KPKDTLMISRTPEVTCVVVDVSHEDPEVKFNWYVDGV |
| | | EVHNAKTKPCEEQYGSTYRCVSVLTVLHQDWLNGKEY |
| | | KCKVSNKALPAPIEKTISKAKGQPREPQVYTLPPSREEM |
| | | TKNQVSLTCLVKGFYPSDIAVEWESNGQPENNYKTTPP |
| | | VLDSDGSFFLYSKLTVDKSRWQQGNVFSCSVMHEALH |
| | | NHYTQKSLSLSPGKGGGGSGGGGSGGGGSGGGGSGGG |
| | | GSGGGGSDKTHTCPPCPAPELLGGPSVFLFPPKPKDTLM |
| | | ISRTPEVTCVVVDVSHEDPEVKFNWYVDGVEVHNAKT |
| | | KPCEEQYGSTYRCVSVLTVLHQDWLNGKEYKCKVSNK |
| | | ALPAPIEKTISKAKGQPREPQVYTLPPSREEMTKNQVSL |
| | | TCLVKGFYPSDIAVEWESNGQPENNYKTTPPVLDSDGS |
| | | FFLYSKLTVDKSRWQQGNVFSCSVMHEALHNHYTQKS |
| | | LSLSPGK |
| 214 | Anti-PSMA x CD3 - | QVQLVESGGGLVKPGESLRLSCAASGFTFSDYYMYWV |
| | scFc -bispecific | RQAPGKCLEWVAIISDAGYYTYYSDIIKGRFTISRDNAK |
| | molecule | NSLYLQMNSLKAEDTAVYYCARGFPLLRHGAMDYWG |
| | HLE | QGTLVTVSSGGGGSGGGGSGGGGSDIQMTQSPSSLSAS |
| | PM76-B10.17 | VGDRVTITCKASQNVDANVAWYQQKPGQAPKSLIYSA |
| | | SYVYWDVPSRFSGSASGTDFTLTISSVQSEDFATYYCQQ |
| | | YDQQLITFGCGTKLEIKSGGGGSEVQLVESGGGLVQPG |
| | | GSLKLSCAASGFTFNKYAMNWVRQAPGKGLEWVARIR |
| | | SKYNNYATYYADSVKDRFTISRDDSKNTAYLQMNNLK |
| | | TEDTAVYYCVRHGNFGNSYISYWAYWGQGTLVTVSSG |
| | | GGGSGGGGSGGGGSQTVVTQEPSLTVSPGGTVTLTCGS |
| | | STGAVTSGNYPNWVQQKPGQAPRGLIGGTKFLAPGTPA |
| | | RFSGSLLGGKAALTLSGVQPEDEAEYYCVLWYSNRWV |
| | | FGGGTKLTVLGGGGDKTHTCPPCPAPELLGGPSVFLFPP |
| | | KPKDTLMISRTPEVTCVVVDVSHEDPEVKFNWYVDGV |
| | | EVHNAKTKPCEEQYGSTYRCVSVLTVLHQDWLNGKEY |
| | | KCKVSNKALPAPIEKTISKAKGQPREPQVYTLPPSREEM |
| | | TKNQVSLTCLVKGFYPSDIAVEWESNGQPENNYKTTPP |
| | | VLDSDGSFFLYSKLTVDKSRWQQGNVFSCSVMHEALH |
| | | NHYTQKSLSLSPGGGGSGGGGSGGGGSGGGGSGGGGS |
| | | GGGGSDKTHTCPPCPAPELLGGPSVFLFPPKPKDTLMIS |
| | | RTPEVTCVVVDVSHEDPEVKFNWYVDGVEVHNAKTKP |
| | | CEEQYGSTYRCVSVLTVLHQDWLNGKEYKCKVSNKAL |
| | | PAPIEKTISKAKGQPREPQVYTLPPSREEMTKNQVSLTC |
| | | LVKGFYPSDIAVEWESNGQPENNYKTTPPVLDSDGSFFL |
| | | YSKLTVDKSRWQQGNVFSCSVMHEALHNHYTQKSLSL |
| | | SPGK |
| 215 | PM76-B10.17 (cys | QVQLVESGGGLVKPGESLRLSCAASGFTFSDYYMYWV |
| | clamp) x CD3 (Cys | RQAPGKCLEWVAIISDAGYYTYYSDIIKGRFTISRDNAK |
| | clamp 103/43) | NSLYLQMNSLKAEDTAVYYCARGFPLLRHGAMDYWG |
| | bispecific molecule | QGTLVTVSSGGGGSGGGGSGGGGSDIQMTQSPSSLSAS |
| | | VGDRVTITCKASQNVDANVAWYQQKPGQAPKSLIYSA |
| | | SYVYWDVPSRFSGSASGTDFTLTISSVQSEDFATYYCQQ |
| | | YDQQLITFGCGTKLEIKSGGGGSEVQLVESGGGLVQPG |
| | | GSLKLSCAASGFTFNKYAMNWVRQAPGKGLEWVARIR |
| | | SKYNNYATYYADSVKDRFTISRDDSKNTAYLQMNNLK |
| | | TEDTAVYYCVRHGNFGNSYISYWAYCGQGTLVTVSSG |
| | | GGGSGGGGSGGGGSQTVVTQEPSLTVSPGGTVTLTCGS |
| | | STGAVTSGNYPNWVQQKPGQCPRGLIGGTKFLAPGTPA |
| | | RFSGSLLGGKAALTLSGVQPEDEAEYYCVLWYSNRWV |
| | | FGGGTKLTVL |
| 216 | PM76-B10.17 (cys | QVQLVESGGGLVKPGESLRLSCAASGFTFSDYYMYWV |
| | clamp) x CD3 (cys | RQAPGKCLEWVAIISDAGYYTYYSDIIKGRFTISRDNAK |
| | clamp 103/43)-scFc | NSLYLQMNSLKAEDTAVYYCARGFPLLRHGAMDYWG |
| | bispecific | QGTLVTVSSGGGGSGGGGSGGGGSDIQMTQSPSSLSAS |
| | HLE molecule | VGDRVTITCKASQNVDANVAWYQQKPGQAPKSLIYSA |
| | | SYVYWDVPSRFSGSASGTDFTLTISSVQSEDFATYYCQQ |
| | | YDQQLITFGCGTKLEIKSGGGGSEVQLVESGGGLVQPG |
| | | GSLKLSCAASGFTFNKYAMNWVRQAPGKGLEWVARIR |
| | | SKYNNYATYYADSVKDRFTISRDDSKNTAYLQMNNLK |
| | | TEDTAVYYCVRHGNFGNSYISYWAYCGQGTLVTVSSG |
| | | GGGSGGGGSGGGGSQTVVTQEPSLTVSPGGTVTLTCGS |
| | | STGAVTSGNYPNWVQQKPGQCPRGLIGGTKFLAPGTPA |
| | | RFSGSLLGGKAALTLSGVQPEDEAEYYCVLWYSNRWV |
| | | FGGGTKLTVLGGGGDKTHTCPPCPAPELLGGPSVFLFPP |
| | | KPKDTLMISRTPEVTCVVVDVSHEDPEVKFNWYVDGV |
| | | EVHNAKTKPCEEQYGSTYRCVSVLTVLHQDWLNGKEY |
| | | KCKVSNKALPAPIEKTISKAKGQPREPQVYTLPPSREEM |
| | | TKNQVSLTCLVKGFYPSDIAVEWESNGQPENNYKTTPP |
| | | VLDSDGSFFLYSKLTVDKSRWQQGNVFSCSVMHEALH |
| | | NHYTQKSLSLSPGKGGGGSGGGGSGGGGSGGGGSGGG |
| | | GSGGGGSDKTHTCPPCPAPELLGGPSVFLFPPKPKDTLM |
| | | ISRTPEVTCVVVDVSHEDPEVKFNWYVDGVEVHNAKT |
| | | KPCEEQYGSTYRCVSVLTVLHQDWLNGKEYKCKVSNK |
| | | ALPAPIEKTISKAKGQPREPQVYTLPPSREEMTKNQVSL |
| | | TCLVKGFYPSDIAVEWESNGQPENNYKTTPPVLDSDGS |
| | | FFLYSKLTVDKSRWQQGNVFSCSVMHEALHNHYTQKS |
| | | LSLSPGK |
| 217 | PM76-B10.17 (cys | QVQLVESGGGLVKPGESLRLSCAASGFTFSDYYMYWV |
| | clamp) x CD3 (cys | RQAPGKCLEWVAIISDAGYYTYYSDIIKGRFTISRDNAK |
| | clamp 103/43)-scFc | NSLYLQMNSLKAEDTAVYYCARGFPLLRHGAMDYWG |
| | bispecific | QGTLVTVSSGGGGSGGGGSGGGGSDIQMTQSPSSLSAS |
| | HLE molecule | VGDRVTITCKASQNVDANVAWYQQKPGQAPKSLIYSA |
| | | SYVYWDVPSRFSGSASGTDFTLTISSVQSEDFATYYCQQ |
| | | YDQQLITFGCGTKLEIKSGGGGSEVQLVESGGGLVQPG |
| | | GSLKLSCAASGFTFNKYAMNWVRQAPGKGLEWVARIR |
| | | SKYNNYATYYADSVKDRFTISRDDSKNTAYLQMNNLK |
| | | TEDTAVYYCVRHGNFGNSYISYWAYCGQGTLVTVSSG |
| | | GGGSGGGGSGGGGSQTVVTQEPSLTVSPGGTVTLTCGS |
| | | STGAVTSGNYPNWVQQKPGQCPRGLIGGTKFLAPGTPA |
| | | RFSGSLLGGKAALTLSGVQPEDEAEYYCVLWYSNRWV |
| | | FGGGTKLTVLGGGGDKTHTCPPCPAPELLGGPSVFLFPP |
| | | KPKDTLMISRTPEVTCVVVDVSHEDPEVKFNWYVDGV |
| | | EVHNAKTKPCEEQYGSTYRCVSVLTVLHQDWLNGKEY |
| | | KCKVSNKALPAPIEKTISKAKGQPREPQVYTLPPSREEM |
| | | TKNQVSLTCLVKGFYPSDIAVEWESNGQPENNYKTTPP |
| | | VLDSDGSFFLYSKLTVDKSRWQQGNVFSCSVMHEALH |
| | | NHYTQKSLSLSPGGGGSGGGGSGGGGSGGGGSGGGGS |
| | | GGGGSDKTHTCPPCPAPELLGGPSVFLFPPKPKDTLMIS |
| | | RTPEVTCVVVDVSHEDPEVKFNWYVDGVEVHNAKTKP |
| | | CEEQYGSTYRCVSVLTVLHQDWLNGKEYKCKVSNKAL |
| | | PAPIEKTISKAKGQPREPQVYTLPPSREEMTKNQVSLTC |
| | | LVKGFYPSDIAVEWESNGQPENNYKTTPPVLDSDGSFFL |
| | | YSKLTVDKSRWQQGNVFSCSVMHEALHNHYTQKSLSL |
| | | SPGK |

PSMA

| | | |
|---|---|---|
| 218 | Anti-PSMA CDR-H1 | DYYMY |
| | (PM76-B10.11) | |
| 219 | Anti-PSMA CDR-H2 | IISDGGYYTYYSDIIKG |
| 220 | Anti-PSMA CDR-H3 | GFPLLRHGAMDY |
| 221 | Anti-PSMA CDR-L1 | KASQNVDTNVA |
| 222 | Anti-PSMA CDR-L2 | SASYVYW |
| 223 | Anti-PSMA CDR-L3 | QQYDQQLIT |
| 224 | Anti-PSMA VH | QVQLVESGGGLVKPGESLRLSCAASGFTFSDYYMYWV |
| | without cys-clamp | RQAPGKGLEWVAIISDGGYYTYYSDIIKGRFTISRDNAK |
| | PM76-B10.11 | NSLYLQMNSLKAEDTAVYYCARGFPLLRHGAMDYWG |
| | | QGTLVTVSS |
| 225 | Anti-PSMA VH with | QVQLVESGGGLVKPGESLRLSCAASGFTFSDYYMYWV |
| | cys-clamp | RQAPGKCLEWVAIISDGGYYTYYSDIIKGRFTISRDNAK |
| | PM76-B10.11 | NSLYLQMNSLKAEDTAVYYCARGFPLLRHGAMDYWG |
| | | QGTLVTVSS |
| 226 | Anti-PSMA VL | DIQMTQSPSSLSASVGDRVTITCKASQNVDTNVAWYQQ |
| | without cys-clamp | KPGQAPKSLIYSASYVYWDVPSRFSGSASGTDFTLTISS |
| | PM76-B10.11 | VQSEDFATYYCQQYDQQLITFGGGTKLEIK |
| 227 | Anti-PSMA VL with | DIQMTQSPSSLSASVGDRVTITCKASQNVDTNVAWYQQ |
| | cys-clamp | KPGQAPKSLIYSASYVYWDVPSRFSGSASGTDFTLTISS |
| | PM76-B10.11 | VQSEDFATYYCQQYDQQLITFGCGTKLEIK |
| 228 | Anti-PSMA VH-VL | QVQLVESGGGLVKPGESLRLSCAASGFTFSDYYMYWV |
| | without cys-clamp | RQAPGKGLEWVAIISDGGYYTYYSDIIKGRFTISRDNAK |
| | PM76-B10.11 | NSLYLQMNSLKAEDTAVYYCARGFPLLRHGAMDYWG |
| | | QGTLVTVSSGGGGSGGGGSGGGGSDIQMTQSPSSLSAS |
| | | VGDRVTITCKASQNVDTNVAWYQQKPGQAPKSLIYSAS |
| | | YVYWDVPSRFSGSASGTDFTLTISSVQSEDFATYYCQQ |
| | | YDQQLITFGGGTKLEIK |
| 229 | Anti-PSMA VH-VL | QVQLVESGGGLVKPGESLRLSCAASGFTFSDYYMYWV |
| | with cys-clamp | RQAPGKCLEWVAIISDGGYYTYYSDIIKGRFTISRDNAK |
| | PM76-B10.11 | NSLYLQMNSLKAEDTAVYYCARGFPLLRHGAMDYWG |
| | | QGTLVTVSSGGGGSGGGGSGGGGSDIQMTQSPSSLSAS |
| | | VGDRVTITCKASQNVDTNVAWYQQKPGQAPKSLIYSAS |
| | | YVYWDVPSRFSGSASGTDFTLTISSVQSEDFATYYCQQ |
| | | YDQQLITFGCGTKLEIK |
| 230 | Anti-PSMA x CD3 | QVQLVESGGGLVKPGESLRLSCAASGFTFSDYYMYWV |
| | without cys-clamp | RQAPGKGLEWVAIISDGGYYTYYSDIIKGRFTISRDNAK |
| | Bispecific molecule | NSLYLQMNSLKAEDTAVYYCARGFPLLRHGAMDYWG |
| | PM76-B10.11 | QGTLVTVSSGGGGSGGGGSGGGGSDIQMTQSPSSLSAS |
| | | VGDRVTITCKASQNVDTNVAWYQQKPGQAPKSLIYSAS |
| | | YVYWDVPSRFSGSASGTDFTLTISSVQSEDFATYYCQQ |
| | | YDQQLITFGGGTKLEIKSGGGGSEVQLVESGGGLVQPG |
| | | GSLKLSCAASGFTFNKYAMNWVRQAPGKGLEWVARIR |
| | | SKYNNYATYYADSVKDRFTISRDDSKNTAYLQMNNLK |
| | | TEDTAVYYCVRHGNFGNSYISYWAYWGQGTLVTVSSG |
| | | GGGSGGGGSGGGGSQTVVTQEPSLTVSPGGTVTLTCGS |
| | | STGAVTSGNYPNWVQQKPGQAPRGLIGGTKFLAPGTPA |
| | | RFSGSLLGGKAALTLSGVQPEDEAEYYCVLWYSNRWV |
| | | FGGGTKLTVL |
| 231 | Anti-PSMA x CD3 | QVQLVESGGGLVKPGESLRLSCAASGFTFSDYYMYWV |
| | with cys-clamp | RQAPGKCLEWVAIISDGGYYTYYSDIIKGRFTISRDNAK |
| | Bispecific molecule | NSLYLQMNSLKAEDTAVYYCARGFPLLRHGAMDYWG |
| | PM76-B10.11 | QGTLVTVSSGGGGSGGGGSGGGGSDIQMTQSPSSLSAS |
| | | VGDRVTITCKASQNVDTNVAWYQQKPGQAPKSLIYSAS |
| | | YVYWDVPSRFSGSASGTDFTLTISSVQSEDFATYYCQQ |
| | | YDQQLITFGCGTKLEIKSGGGGSEVQLVESGGGLVQPG |
| | | GSLKLSCAASGFTFNKYAMNWVRQAPGKGLEWVARIR |
| | | SKYNNYATYYADSVKDRFTISRDDSKNTAYLQMNNLK |
| | | TEDTAVYYCVRHGNFGNSYISYWAYWGQGTLVTVSSG |
| | | GGGSGGGGSGGGGSQTVVTQEPSLTVSPGGTVTLTCGS |
| | | STGAVTSGNYPNWVQQKPGQAPRGLIGGTKFLAPGTPA |
| | | RFSGSLLGGKAALTLSGVQPEDEAEYYCVLWYSNRWV |
| | | FGGGTKLTVL |
| 232 | Anti-PSMA x CD3 - | QVQLVESGGGLVKPGESLRLSCAASGFTFSDYYMYWV |
| | scFc without cys-clamp | RQAPGKGLEWVAIISDGGYYTYYSDIIKGRFTISRDNAK |
| | Bispecific molecule | NSLYLQMNSLKAEDTAVYYCARGFPLLRHGAMDYWG |
| | HLE | QGTLVTVSSGGGGSGGGGSGGGGSDIQMTQSPSSLSAS |
| | PM76-B10.11 | VGDRVTITCKASQNVDTNVAWYQQKPGQAPKSLIYSAS |
| | | YVYWDVPSRFSGSASGTDFTLTISSVQSEDFATYYCQQ |
| | | YDQQLITFGGGTKLEIKSGGGGSEVQLVESGGGLVQPG |
| | | GSLKLSCAASGFTFNKYAMNWVRQAPGKGLEWVARIR |
| | | SKYNNYATYYADSVKDRFTISRDDSKNTAYLQMNNLK |
| | | TEDTAVYYCVRHGNFGNSYISYWAYWGQGTLVTVSSG |
| | | GGGSGGGGSGGGGSQTVVTQEPSLTVSPGGTVTLTCGS |
| | | STGAVTSGNYPNWVQQKPGQAPRGLIGGTKFLAPGTPA |
| | | RFSGSLLGGKAALTLSGVQPEDEAEYYCVLWYSNRWV |
| | | FGGGTKLTVLGGGGDKTHTCPPCPAPELLGGPSVFLFPP |
| | | KPKDTLMISRTPEVTCVVVDVSHEDPEVKFNWYVDGV |
| | | EVHNAKTKPCEEQYGSTYRCVSVLTVLHQDWLNGKEY |
| | | KCKVSNKALPAPIEKTISKAKGQPREPQVYTLPPSREEM |
| | | TKNQVSLTCLVKGFYPSDIAVEWESNGQPENNYKTTPP |
| | | VLDSDGSFFLYSKLTVDKSRWQQGNVFSCSVMHEALH |
| | | NHYTQKSLSLSPGKGGGGSGGGGSGGGGSGGGGSGGG |
| | | GSGGGGSDKTHTCPPCPAPELLGGPSVFLFPPKPKDTLM |
| | | ISRTPEVTCVVVDVSHEDPEVKFNWYVDGVEVHNAKT |
| | | KPCEEQYGSTYRCVSVLTVLHQDWLNGKEYKCKVSNK |
| | | ALPAPIEKTISKAKGQPREPQVYTLPPSREEMTKNQVSL |
| | | TCLVKGFYPSDIAVEWESNGQPENNYKTTPPVLDSDGS |
| | | FFLYSKLTVDKSRWQQGNVFSCSVMHEALHNHYTQKS |
| | | LSLSPGK |
| 233 | PM76-B10.11 x CD3 - | QVQLVESGGGLVKPGESLRLSCAASGFTFSDYYMYWV |
| | scFc_ bispecific | RQAPGKGLEWVAIISDGGYYTYYSDIIKGRFTISRDNAK |
| | HLE molecule (without | NSLYLQMNSLKAEDTAVYYCARGFPLLRHGAMDYWG |
| | cys clamp) | QGTLVTVSSGGGGSGGGGSGGGGSDIQMTQSPSSLSAS |
| | | VGDRVTITCKASQNVDTNVAWYQQKPGQAPKSLIYSAS |
| | | YVYWDVPSRFSGSASGTDFTLTISSVQSEDFATYYCQQ |
| | | YDQQLITFGGGTKLEIKSGGGGSEVQLVESGGGLVQPG |
| | | GSLKLSCAASGFTFNKYAMNWVRQAPGKGLEWVARIR |
| | | SKYNNYATYYADSVKDRFTISRDDSKNTAYLQMNNLK |
| | | TEDTAVYYCVRHGNFGNSYISYWAYWGQGTLVTVSSG |
| | | GGGSGGGGSGGGGSQTVVTQEPSLTVSPGGTVTLTCGS |
| | | STGAVTSGNYPNWVQQKPGQAPRGLIGGTKFLAPGTPA |
| | | RFSGSLLGGKAALTLSGVQPEDEAEYYCVLWYSNRWV |
| | | FGGGTKLTVLGGGGDKTHTCPPCPAPELLGGPSVFLFPP |
| | | KPKDTLMISRTPEVTCVVVDVSHEDPEVKFNWYVDGV |
| | | EVHNAKTKPCEEQYGSTYRCVSVLTVLHQDWLNGKEY |
| | | KCKVSNKALPAPIEKTISKAKGQPREPQVYTLPPSREEM |
| | | TKNQVSLTCLVKGFYPSDIAVEWESNGQPENNYKTTPP |
| | | VLDSDGSFFLYSKLTVDKSRWQQGNVFSCSVMHEALH |
| | | NHYTQKSLSLSPGGGGSGGGGSGGGGSGGGGSGGGGS |
| | | GGGGSDKTHTCPPCPAPELLGGPSVFLFPPKPKDTLMIS |
| | | RTPEVTCVVVDVSHEDPEVKFNWYVDGVEVHNAKTKP |
| | | CEEQYGSTYRCVSVLTVLHQDWLNGKEYKCKVSNKAL |
| | | PAPIEKTISKAKGQPREPQVYTLPPSREEMTKNQVSLTC |
| | | LVKGFYPSDIAVEWESNGQPENNYKTTPPVLDSDGSFFL |
| | | YSKLTVDKSRWQQGNVFSCSVMHEALHNHYTQKSLSL |
| | | SPGK |
| 234 | PM76-B10.11 x CD3 | QVQLVESGGGLVKPGESLRLSCAASGFTFSDYYMYWV |
| | (cys clamp 103/43) | RQAPGKGLEWVAIISDGGYYTYYSDIIKGRFTISRDNAK |
| | bispecific molecule | NSLYLQMNSLKAEDTAVYYCARGFPLLRHGAMDYWG |
| | | QGTLVTVSSGGGGSGGGGSGGGGSDIQMTQSPSSLSAS |
| | | VGDRVTITCKASQNVDTNVAWYQQKPGQAPKSLIYSAS |
| | | YVYWDVPSRFSGSASGTDFTLTISSVQSEDFATYYCQQ |
| | | YDQQLITFGGGTKLEIKSGGGGSEVQLVESGGGLVQPG |
| | | GSLKLSCAASGFTFNKYAMNWVRQAPGKGLEWVARIR |
| | | SKYNNYATYYADSVKDRFTISRDDSKNTAYLQMNNLK |
| | | TEDTAVYYCVRHGNFGNSYISYWAYCGQGTLVTVSSG |
| | | GGGSGGGGSGGGGSQTVVTQEPSLTVSPGGTVTLTCGS |
| | | STGAVTSGNYPNWVQQKPGQCPRGLIGGTKFLAPGTPA |
| | | RFSGSLLGGKAALTLSGVQPEDEAEYYCVLWYSNRWV |
| | | FGGGTKLTVL |
| 235 | PM76-B10.11 x CD3 | QVQLVESGGGLVKPGESLRLSCAASGFTFSDYYMYWV |
| | (cys clamp 103/43)- | RQAPGKGLEWVAIISDGGYYTYYSDIIKGRFTISRDNAK |
| | scFc bispecific | NSLYLQMNSLKAEDTAVYYCARGFPLLRHGAMDYWG |
| | HLE molecule | QGTLVTVSSGGGGSGGGGSGGGGSDIQMTQSPSSLSAS |
| | | VGDRVTITCKASQNVDTNVAWYQQKPGQAPKSLIYSAS |
| | | YVYWDVPSRFSGSASGTDFTLTISSVQSEDFATYYCQQ |
| | | YDQQLITFGGGTKLEIKSGGGGSEVQLVESGGGLVQPG |
| | | GSLKLSCAASGFTFNKYAMNWVRQAPGKGLEWVARIR |
| | | SKYNNYATYYADSVKDRFTISRDDSKNTAYLQMNNLK |
| | | TEDTAVYYCVRHGNFGNSYISYWAYCGQGTLVTVSSG |
| | | GGGSGGGGSGGGGSQTVVTQEPSLTVSPGGTVTLTCGS |
| | | STGAVTSGNYPNWVQQKPGQCPRGLIGGTKFLAPGTPA |
| | | RFSGSLLGGKAALTLSGVQPEDEAEYYCVLWYSNRWV |
| | | FGGGTKLTVLGGGGDKTHTCPPCPAPELLGGPSVFLFPP |
| | | KPKDTLMISRTPEVTCVVVDVSHEDPEVKFNWYVDGV |
| | | EVHNAKTKPCEEQYGSTYRCVSVLTVLHQDWLNGKEY |
| | | KCKVSNKALPAPIEKTISKAKGQPREPQVYTLPPSREEM |
| | | TKNQVSLTCLVKGFYPSDIAVEWESNGQPENNYKTTPP |
| | | VLDSDGSFFLYSKLTVDKSRWQQGNVFSCSVMHEALH |
| | | NHYTQKSLSLSPGKGGGGSGGGGSGGGGSGGGGSGGG |
| | | GSGGGGSDKTHTCPPCPAPELLGGPSVFLFPPKPKDTLM |
| | | ISRTPEVTCVVVDVSHEDPEVKFNWYVDGVEVHNAKT |
| | | KPCEEQYGSTYRCVSVLTVLHQDWLNGKEYKCKVSNK |
| | | ALPAPIEKTISKAKGQPREPQVYTLPPSREEMTKNQVSL |
| | | TCLVKGFYPSDIAVEWESNGQPENNYKTTPPVLDSDGS |
| | | FFLYSKLTVDKSRWQQGNVFSCSVMHEALHNHYTQKS |
| | | LSLSPGK |
| 236 | PM76-B10.11 x CD3 | QVQLVESGGGLVKPGESLRLSCAASGFTFSDYYMYWV |
| | (cys clamp 103/43)- | RQAPGKGLEWVAIISDGGYYTYYSDIIKGRFTISRDNAK |
| | scFc_ bispecific | NSLYLQMNSLKAEDTAVYYCARGFPLLRHGAMDYWG |
| | HLE molecule | QGTLVTVSSGGGGSGGGGSGGGGSDIQMTQSPSSLSAS |
| | | VGDRVTITCKASQNVDTNVAWYQQKPGQAPKSLIYSAS |
| | | YVYWDVPSRFSGSASGTDFTLTISSVQSEDFATYYCQQ |
| | | YDQQLITFGGGTKLEIKSGGGGSEVQLVESGGGLVQPG |
| | | GSLKLSCAASGFTFNKYAMNWVRQAPGKGLEWVARIR |
| | | SKYNNYATYYADSVKDRFTISRDDSKNTAYLQMNNLK |
| | | TEDTAVYYCVRHGNFGNSYISYWAYCGQGTLVTVSSG |
| | | GGGSGGGGSGGGGSQTVVTQEPSLTVSPGGTVTLTCGS |
| | | STGAVTSGNYPNWVQQKPGQCPRGLIGGTKFLAPGTPA |
| | | RFSGSLLGGKAALTLSGVQPEDEAEYYCVLWYSNRWV |
| | | FGGGTKLTVLGGGGDKTHTCPPCPAPELLGGPSVFLFPP |
| | | KPKDTLMISRTPEVTCVVVDVSHEDPEVKFNWYVDGV |
| | | EVHNAKTKPCEEQYGSTYRCVSVLTVLHQDWLNGKEY |
| | | KCKVSNKALPAPIEKTISKAKGQPREPQVYTLPPSREEM |
| | | TKNQVSLTCLVKGFYPSDIAVEWESNGQPENNYKTTPP |
| | | VLDSDGSFFLYSKLTVDKSRWQQGNVFSCSVMHEALH |
| | | NHYTQKSLSLSPGGGGSGGGGSGGGGSGGGGSGGGGS |
| | | GGGGSDKTHTCPPCPAPELLGGPSVFLFPPKPKDTLMIS |
| | | RTPEVTCVVVDVSHEDPEVKFNWYVDGVEVHNAKTKP |
| | | CEEQYGSTYRCVSVLTVLHQDWLNGKEYKCKVSNKAL |
| | | PAPIEKTISKAKGQPREPQVYTLPPSREEMTKNQVSLTC |
| | | LVKGFYPSDIAVEWESNGQPENNYKTTPPVLDSDGSFFL |
| | | YSKLTVDKSRWQQGNVFSCSVMHEALHNHYTQKSLSL |
| | | SPGK |
| 237 | Anti-PSMA x CD3 | QVQLVESGGGLVKPGESLRLSCAASGFTFSDYYMYWV |
| | with cys-clamp, scFc | RQAPGKCLEWVAIISDGGYYTYYSDIIKGRFTISRDNAK |
| | Bispecific molecule | NSLYLQMNSLKAEDTAVYYCARGFPLLRHGAMDYWG |
| | HLE | QGTLVTVSSGGGGSGGGGSGGGGSDIQMTQSPSSLSAS |
| | PM76-B10.11 | VGDRVTITCKASQNVDTNVAWYQQKPGQAPKSLIYSAS |
| | | YVYWDVPSRFSGSASGTDFTLTISSVQSEDFATYYCQQ |
| | | YDQQLITFGCGTKLEIKSGGGGSEVQLVESGGGLVQPG |
| | | GSLKLSCAASGFTFNKYAMNWVRQAPGKGLEWVARIR |
| | | SKYNNYATYYADSVKDRFTISRDDSKNTAYLQMNNLK |
| | | TEDTAVYYCVRHGNFGNSYISYWAYWGQGTLVTVSSG |
| | | GGGSGGGGSGGGGSQTVVTQEPSLTVSPGGTVTLTCGS |
| | | STGAVTSGNYPNWVQQKPGQAPRGLIGGTKFLAPGTPA |
| | | RFSGSLLGGKAALTLSGVQPEDEAEYYCVLWYSNRWV |
| | | FGGGTKLTVLGGGGDKTHTCPPCPAPELLGGPSVFLFPP |
| | | KPKDTLMISRTPEVTCVVVDVSHEDPEVKFNWYVDGV |
| | | EVHNAKTKPCEEQYGSTYRCVSVLTVLHQDWLNGKEY |
| | | KCKVSNKALPAPIEKTISKAKGQPREPQVYTLPPSREEM |
| | | TKNQVSLTCLVKGFYPSDIAVEWESNGQPENNYKTTPP |
| | | VLDSDGSFFLYSKLTVDKSRWQQGNVFSCSVMHEALH |
| | | NHYTQKSLSLSPGKGGGGSGGGGSGGGGSGGGGSGGG |
| | | GSGGGGSDKTHTCPPCPAPELLGGPSVFLFPPKPKDTLM |
| | | ISRTPEVTCVVVDVSHEDPEVKFNWYVDGVEVHNAKT |
| | | KPCEEQYGSTYRCVSVLTVLHQDWLNGKEYKCKVSNK |
| | | ALPAPIEKTISKAKGQPREPQVYTLPPSREEMTKNQVSL |
| | | TCLVKGFYPSDIAVEWESNGQPENNYKTTPPVLDSDGS |
| | | FFLYSKLTVDKSRWQQGNVFSCSVMHEALHNHYTQKS |
| | | LSLSPGK |
| 238 | PM76-B10.11 CD3 | QVQLVESGGGLVKPGESLRLSCAASGFTFSDYYMYWV |
| | with cys-clamp, scFc_ | RQAPGKCLEWVAIISDGGYYTYYSDIIKGRFTISRDNAK |
| | bispecific | NSLYLQMNSLKAEDTAVYYCARGFPLLRHGAMDYWG |
| | HLE molecule | QGTLVTVSSGGGGSGGGGSGGGGSDIQMTQSPSSLSAS |
| | | VGDRVTITCKASQNVDTNVAWYQQKPGQAPKSLIYSAS |
| | | YVYWDVPSRFSGSASGTDFTLTISSVQSEDFATYYCQQ |
| | | YDQQLITFGCGTKLEIKSGGGGSEVQLVESGGGLVQPG |
| | | GSLKLSCAASGFTFNKYAMNWVRQAPGKGLEWVARIR |
| | | SKYNNYATYYADSVKDRFTISRDDSKNTAYLQMNNLK |
| | | TEDTAVYYCVRHGNFGNSYISYWAYWGQGTLVTVSSG |
| | | GGGSGGGGSGGGGSQTVVTQEPSLTVSPGGTVTLTCGS |
| | | STGAVTSGNYPNWVQQKPGQAPRGLIGGTKFLAPGTPA |
| | | RFSGSLLGGKAALTLSGVQPEDEAEYYCVLWYSNRWV |
| | | FGGGTKLTVLGGGGDKTHTCPPCPAPELLGGPSVFLFPP |
| | | KPKDTLMISRTPEVTCVVVDVSHEDPEVKFNWYVDGV |
| | | EVHNAKTKPCEEQYGSTYRCVSVLTVLHQDWLNGKEY |
| | | KCKVSNKALPAPIEKTISKAKGQPREPQVYTLPPSREEM |
| | | TKNQVSLTCLVKGFYPSDIAVEWESNGQPENNYKTTPP |
| | | VLDSDGSFFLYSKLTVDKSRWQQGNVFSCSVMHEALH |
| | | NHYTQKSLSLSPGGGGSGGGGSGGGGSGGGGSGGGGS |
| | | GGGGSDKTHTCPPCPAPELLGGPSVFLFPPKPKDTLMIS |
| | | RTPEVTCVVVDVSHEDPEVKFNWYVDGVEVHNAKTKP |
| | | CEEQYGSTYRCVSVLTVLHQDWLNGKEYKCKVSNKAL |
| | | PAPIEKTISKAKGQPREPQVYTLPPSREEMTKNQVSLTC |
| | | LVKGFYPSDIAVEWESNGQPENNYKTTPPVLDSDGSFFL |
| | | YSKLTVDKSRWQQGNVFSCSVMHEALHNHYTQKSLSL |
| | | SPGK |
| 239 | PM76-B10.11 x CD3 | QVQLVESGGGLVKPGESLRLSCAASGFTFSDYYMYWV |
| | scFc bispecific | RQAPGKCLEWVAIISDGGYYTYYSDIIKGRFTISRDNAK |
| | HLE molecule (with | NSLYLQMNSLKAEDTAVYYCARGFPLLRHGAMDYWG |
| | cys-clamp; second cys | QGTLVTVSSGGGGSGGGGSGGGGSDIQMTQSPSSLSAS |
| | clamp at CD3 103/43) | VGDRVTITCKASQNVDTNVAWYQQKPGQAPKSLIYSAS |
| | | YVYWDVPSRFSGSASGTDFTLTISSVQSEDFATYYCQQ |
| | | YDQQLITFGCGTKLEIKSGGGGSEVQLVESGGGLVQPG |
| | | GSLKLSCAASGFTFNKYAMNWVRQAPGKGLEWVARIR |
| | | SKYNNYATYYADSVKDRFTISRDDSKNTAYLQMNNLK |
| | | TEDTAVYYCVRHGNFGNSYISYWAYCGQGTLVTVSSG |
| | | GGGSGGGGSGGGGSQTVVTQEPSLTVSPGGTVTLTCGS |
| | | STGAVTSGNYPNWVQQKPGQCPRGLIGGTKFLAPGTPA |
| | | RFSGSLLGGKAALTLSGVQPEDEAEYYCVLWYSNRWV |
| | | FGGGTKLTVLGGGGDKTHTCPPCPAPELLGGPSVFLFPP |
| | | KPKDTLMISRTPEVTCVVVDVSHEDPEVKFNWYVDGV |
| | | EVHNAKTKPCEEQYGSTYRCVSVLTVLHQDWLNGKEY |
| | | KCKVSNKALPAPIEKTISKAKGQPREPQVYTLPPSREEM |
| | | TKNQVSLTCLVKGFYPSDIAVEWESNGQPENNYKTTPP |
| | | VLDSDGSFFLYSKLTVDKSRWQQGNVFSCSVMHEALH |
| | | NHYTQKSLSLSPGKGGGGSGGGGSGGGGSGGGGSGGG |
| | | GSGGGGSDKTHTCPPCPAPELLGGPSVFLFPPKPKDTLM |
| | | ISRTPEVTCVVVDVSHEDPEVKFNWYVDGVEVHNAKT |
| | | KPCEEQYGSTYRCVSVLTVLHQDWLNGKEYKCKVSNK |
| | | ALPAPIEKTISKAKGQPREPQVYTLPPSREEMTKNQVSL |
| | | TCLVKGFYPSDIAVEWESNGQPENNYKTTPPVLDSDGS |
| | | FFLYSKLTVDKSRWQQGNVFSCSVMHEALHNHYTQKS |
| | | LSLSPGK |
| 240 | PM76-B10.11 x CD3 - | QVQLVESGGGLVKPGESLRLSCAASGFTFSDYYMYWV |
| | scFc_ bispecific | RQAPGKCLEWVAIISDGGYYTYYSDIIKGRFTISRDNAK |
| | HLE molecule (with | NSLYLQMNSLKAEDTAVYYCARGFPLLRHGAMDYWG |
| | cys-clamp; second cys | QGTLVTVSSGGGGSGGGGSGGGGSDIQMTQSPSSLSAS |
| | clamp at CD3 103/43-) | VGDRVTITCKASQNVDTNVAWYQQKPGQAPKSLIYSAS |
| | | YVYWDVPSRFSGSASGTDFTLTISSVQSEDFATYYCQQ |
| | | YDQQLITFGCGTKLEIKSGGGGSEVQLVESGGGLVQPG |
| | | GSLKLSCAASGFTFNKYAMNWVRQAPGKGLEWVARIR |
| | | SKYNNYATYYADSVKDRFTISRDDSKNTAYLQMNNLK |
| | | TEDTAVYYCVRHGNFGNSYISYWAYCGQGTLVTVSSG |
| | | GGGSGGGGSGGGGSQTVVTQEPSLTVSPGGTVTLTCGS |
| | | STGAVTSGNYPNWVQQKPGQCPRGLIGGTKFLAPGTPA |
| | | RFSGSLLGGKAALTLSGVQPEDEAEYYCVLWYSNRWV |
| | | FGGGTKLTVLGGGGDKTHTCPPCPAPELLGGPSVFLFPP |
| | | KPKDTLMISRTPEVTCVVVDVSHEDPEVKFNWYVDGV |
| | | EVHNAKTKPCEEQYGSTYRCVSVLTVLHQDWLNGKEY |
| | | KCKVSNKALPAPIEKTISKAKGQPREPQVYTLPPSREEM |
| | | TKNQVSLTCLVKGFYPSDIAVEWESNGQPENNYKTTPP |
| | | VLDSDGSFFLYSKLTVDKSRWQQGNVFSCSVMHEALH |
| | | NHYTQKSLSLSPGGGGSGGGGSGGGGSGGGGSGGGGS |
| | | GGGGSDKTHTCPPCPAPELLGGPSVFLFPPKPKDTLMIS |
| | | RTPEVTCVVVDVSHEDPEVKFNWYVDGVEVHNAKTKP |
| | | CEEQYGSTYRCVSVLTVLHQDWLNGKEYKCKVSNKAL |
| | | PAPIEKTISKAKGQPREPQVYTLPPSREEMTKNQVSLTC |
| | | LVKGFYPSDIAVEWESNGQPENNYKTTPPVLDSDGSFFL |
| | | YSKLTVDKSRWQQGNVFSCSVMHEALHNHYTQKSLSL |
| | | SPGK |

CD70

| | | |
|---|---|---|
| 241 | Anti-CD70 CDR-H1 | TYAMS |
| 242 | Anti-CD70 CDR-H2 | AISGSGGRTFYAESVEG |
| 243 | Anti-CD70 CDR-H3 | HDYSNYPYFDY |
| 244 | Anti-CD70 CDR-L1 | RASQSVRSTYLA |
| 245 | Anti-CD70 CDR-L2 | GASSRAT |
| 246 | Anti-CD70 CDR-L3 | QQYGDLPFT |
| 247 | Anti-CD70 VH | EVQLLESGGGMVQPGGSLRLSCAASGFTFSTYAMSWV |
| | | RQAPGKCLEWVSAISGSGGRTFYAESVEGRFTISRDNSK |
| | | NTLYLQMNSLRAEDTAVYYCAKHDYSNYPYFDYWGQ |
| | | GTLVTVSS |
| 248 | Anti-CD70 VL | EIVLTQSPGTLSLSPGERATLSCRASQSVRSTYLAWYQQ |
| | | K |
| | | PGQAPRLLIYGASSRATGIPDRFSGSGSGTDFTLTISRLE |
| | | PEDFAVYSCQQYGDLPFTFGCGTKLEIK |
| 249 | Anti-CD70 scFv (cys | EVQLLESGGGMVQPGGSLRLSCAASGFTFSTYAMSWV |
| | clamp) | RQAPGKCLEWVSAISGSGGRTFYAESVEGRFTISRDNSK |
| | | NTLYLQMNSLRAEDTAVYYCAKHDYSNYPYFDYWGQ |
| | | GTLVTVSSGGGGSGGGGSGGGGSEIVLTQSPGTLSLSPG |
| | | ERATLSCRASQSVRSTYLAWYQQKPGQAPRLLIYGASS |
| | | RATGIPDRFSGSGSGTDFTLTISRLEPEDFAVYSCQQYGD |
| | | LPFTFGCGTKLEIK |
| 250 | Anti-CD70 VH-VL | EVQLLESGGGMVQPGGSLRLSCAASGFTFSTYAMSWV |
| | scFc | RQAPGKCLEWVSAISGSGGRTFYAESVEGRFTISRDNSK |
| | | NTLYLQMNSLRAEDTAVYYCAKHDYSNYPYFDYWGQ |
| | | GTLVTVSSGGGGSGGGGSGGGGSEIVLTQSPGTLSLSPG |
| | | ERATLSCRASQSVRSTYLAWYQQKPGQAPRLLIYGASS |
| | | RATGIPDRFSGSGSGTDFTLTISRLEPEDFAVYSCQQYGD |
| | | LPFTFGCGTKLEIKSGGGGSEVQLVESGGGLVQPGGSLK |
| | | LSCAASGFTFNKYAMNWVRQAPGKGLEWVARIRSKYN |
| | | NYATYYADSVKDRFTISRDDSKNTAYLQMNNLKTEDT |
| | | AVYYCVRHGNFGNSYISYWAYWGQGTLVTVSSGGGGS |
| | | GGGGSGGGGSQTVVTQEPSLTVSPGGTVTLTCGSSTGA |
| | | VTSGNYPNWVQQKPGQAPRGLIGGTKFLAPGTPARFSG |
| | | SLLGGKAALTLSGVQPEDEAEYYCVLWYSNRWVFGGG |
| | | TKLTVLGGGGDKTHTCPPCPAPELLGGPSVFLFPPKPKD |
| | | TLMISRTPEVTCVVVDVSHEDPEVKFNWYVDGVEVHN |
| | | AKTKPCEEQYGSTYRCVSVLTVLHQDWLNGKEYKCKV |
| | | SNKALPAPIEKTISKAKGQPREPQVYTLPPSREEMTKNQ |
| | | VSLTCLVKGFYPSDIAVEWESNGQPENNYKTTPPVLDS |
| | | DGSFFLYSKLTVDKSRWQQGNVFSCSVMHEALHNHYT |
| | | QKSLSLSPGKGGGGSGGGGSGGGGSGGGGSGGGGSGG |
| | | GGSDKTHTCPPCPAPELLGGPSVFLFPPKPKDTLMISRTP |
| | | EVTCVVVDVSHEDPEVKFNWYVDGVEVHNAKTKPCEE |
| | | QYGSTYRCVSVLTVLHQDWLNGKEYKCKVSNKALPAP |
| | | IEKTISKAKGQPREPQVYTLPPSREEMTKNQVSLTCLVK |
| | | GFYPSDIAVEWESNGQPENNYKTTPPVLDSDGSFFLYSK |
| | | LTVDKSRWQQGNVFSCSVMHEALHNHYTQKSLSLSPG |
| | | K |

CLDN18.2

| | | |
|---|---|---|
| 251 | VH CDR-H1 | GYYMH |
| | CL-1 and CL-2 | |
| 252 | VH CDR-H2 | WINPNSGGTKYAQKFQG |
| 253 | VH CDR-H3 | DRITVAGTYYYYGMDV |
| 254 | VL CDR-L1 | RASQGVNNWLA |
| 255 | VL CDR-L2 | TASSLQS |
| 256 | VL CDR-L3 | QQANSFPIT |
| 257 | VH | QVQLVQSGAEVKKPGASVKVSCKASGYTFTGYYMHW |
| | CL-1 | VRQAPGQCLEWMGWINPNSGGTKYAQKFQGRVTMTR |
| | | DTSISTAYMELSRLRSDDTAVYYCARDRITVAGTYYYY |
| | | GMDVWGQGTTVTVSS |
| 258 | VL | DIQMTQSPSSVSASVGDRVTITCRASQGVNNWLAWYQ |
| | CL-1 | QKPGKAPKLLIYTASSLQSGVPSRFSGSGSGTDFTLTIRS |
| | | LQPEDFATYYCQQANSFPITFGCGTRLEIK |
| 259 | scFv | QVQLVQSGAEVKKPGASVKVSCKASGYTFTGYYMHW |
| | CL-1 | VRQAPGQCLEWMGWINPNSGGTKYAQKFQGRVTMTR |
| | | DTSISTAYMELSRLRSDDTAVYYCARDRITVAGTYYYY |
| | | GMDVWGQGTTVTVSSGGGGSGGGGSGGGGSDIQMTQ |
| | | SPSSVSASVGDRVTITCRASQGVNNWLAWYQQKPGKA |
| | | PKLLIYTASSLQSGVPSRFSGSGSGTDFTLTIRSLQPEDFA |
| | | TYYCQQANSFPITFGCGTRLEIK |
| 260 | bispecific | QVQLVQSGAEVKKPGASVKVSCKASGYTFTGYYMHW |
| | molecule | VRQAPGQCLEWMGWINPNSGGTKYAQKFQGRVTMTR |
| | CL-1 xI2C | DTSISTAYMELSRLRSDDTAVYYCARDRITVAGTYYYY |
| | | GMDVWGQGTTVTVSSGGGGSGGGGSGGGGSDIQMTQ |
| | | SPSSVSASVGDRVTITCRASQGVNNWLAWYQQKPGKA |
| | | PKLLIYTASSLQSGVPSRFSGSGSGTDFTLTIRSLQPEDFA |
| | | TYYCQQANSFPITFGCGTRLEIKSGGGGSEVQLVESGGG |
| | | LVQPGGSLKLSCAASGFTFNKYAMNWVRQAPGKGLE |
| | | WVARIRSKYNNYATYYADSVKDRFTISRDDSKNTAYL |
| | | QMNNLKTEDTAVYYCVRHGNFGNSYISYWAYWGQGT |
| | | LVTVSSGGGGSGGGGSGGGGSQTVVTQEPSLTVSPGGT |
| | | VTLTCGSSTGAVTSGNYPNWVQQKPGQAPRGLIGGTKF |
| | | LAPGTPARFSGSLLGGKAALTLSGVQPEDEAEYYCVLW |
| | | YSNRWVFGGGTKLTVL |
| 261 | Bispecific scFc | QVQLVQSGAEVKKPGASVKVSCKASGYTFTGYYMHW |
| | molecule | VRQAPGQCLEWMGWINPNSGGTKYAQKFQGRVTMTR |
| | CL-1 xI2C-scFc | DTSISTAYMELSRLRSDDTAVYYCARDRITVAGTYYYY |
| | | GMDVWGQGTTVTVSSGGGGSGGGGSGGGGSDIQMTQ |
| | | SPSSVSASVGDRVTITCRASQGVNNWLAWYQQKPGKA |
| | | PKLLIYTASSLQSGVPSRFSGSGSGTDFTLTIRSLQPEDFA |
| | | TYYCQQANSFPITFGCGTRLEIKSGGGGSEVQLVESGGG |
| | | LVQPGGSLKLSCAASGFTFNKYAMNWVRQAPGKGLE |
| | | WVARIRSKYNNYATYYADSVKDRFTISRDDSKNTAYL |
| | | QMNNLKTEDTAVYYCVRHGNFGNSYISYWAYWGQGT |
| | | LVTVSSGGGGSGGGGSGGGGSQTVVTQEPSLTVSPGGT |
| | | VTLTCGSSTGAVTSGNYPNWVQQKPGQAPRGLIGGTKF |
| | | LAPGTPARFSGSLLGGKAALTLSGVQPEDEAEYYCVLW |
| | | YSNRWVFGGGTKLTVLGGGGDKTHTCPPCPAPELLGGP |
| | | SVFLFPPKPKDTLMISRTPEVTCVVVDVSHEDPEVKFNW |
| | | YVDGVEVHNAKTKPCEEQYGSTYRCVSVLTVLHQDWL |
| | | NGKEYKCKVSNKALPAPIEKTISKAKGQPREPQVYTLPP |
| | | SREEMTKNQVSLTCLVKGFYPSDIAVEWESNGQPENNY |
| | | KTTPPVLDSDGSFFLYSKLTVDKSRWQQGNVFSCSVMH |
| | | EALHNHYTQKSLSLSPGKGGGGSGGGGSGGGGSGGGG |
| | | SGGGGSGGGGSDKTHTCPPCPAPELLGGPSVFLFPPKPK |
| | | DTLMISRTPEVTCVVVDVSHEDPEVKFNWYVDGVEVH |
| | | NAKTKPCEEQYGSTYRCVSVLTVLHQDWLNGKEYKCK |
| | | VSNKALPAPIEKTISKAKGQPREPQVYTLPPSREEMTKN |
| | | QVSLTCLVKGFYPSDIAVEWESNGQPENNYKTTPPVLD |
| | | SDGSFFLYSKLTVDKSRWQQGNVFSCSVMHEALHNHY |
| | | TQKSLSLSPGK |
| 262 | VH | QVQMVQSGAEVKKHGASVKVSCKASGYTFTGYYMHW |
| | CL-2 | VRQAPGQCLEWMGWINPNSGGTKYAQKFQGRVTMTR |
| | | DTSISTAYMELSRLRSDDTAVYYCARDRITVAGTYYYY |
| | | GMDVWGQGTTVTVSS |
| 263 | VL | DIQMTQSPSSVSASVGDRVTITCRASQGVNNWLAWYQ |
| | CL-2 | QKPGKAPKLLIYTASSLQSGVPSRFSGSGSGTDFTLTIRS |
| | | LQPEDFATYYCQQANSFPITFGCGTRLEIK |
| 264 | scFv | QVQMVQSGAEVKKHGASVKVSCKASGYTFTGYYMHW |
| | CL-2 | VRQAPGQCLEWMGWINPNSGGTKYAQKFQGRVTMTR |
| | | DTSISTAYMELSRLRSDDTAVYYCARDRITVAGTYYYY |
| | | GMDVWGQGTTVTVSSGGGGSGGGGSGGGGSDIQMTQ |
| | | SPSSVSASVGDRVTITCRASQGVNNWLAWYQQKPGKA |
| | | PKLLIYTASSLQSGVPSRFSGSGSGTDFTLTIRSLQPEDFA |
| | | TYYCQQANSFPITFGCGTRLEIK |
| 265 | bispecific | QVQMVQSGAEVKKHGASVKVSCKASGYTFTGYYMHW |
| | molecule | VRQAPGQCLEWMGWINPNSGGTKYAQKFQGRVTMTR |
| | CL-2xI2C | DTSISTAYMELSRLRSDDTAVYYCARDRITVAGTYYYY |
| | | GMDVWGQGTTVTVSSGGGGSGGGGSGGGGSDIQMTQ |
| | | SPSSVSASVGDRVTITCRASQGVNNWLAWYQQKPGKA |
| | | PKLLIYTASSLQSGVPSRFSGSGSGTDFTLTIRSLQPEDFA |
| | | TYYCQQANSFPITFGCGTRLEIKSGGGGSEVQLVESGGG |
| | | LVQPGGSLKLSCAASGFTFNKYAMNWVRQAPGKGLE |
| | | WVARIRSKYNNYATYYADSVKDRFTISRDDSKNTAYL |
| | | QMNNLKTEDTAVYYCVRHGNFGNSYISYWAYWGQGT |
| | | LVTVSSGGGGSGGGGSGGGGSQTVVTQEPSLTVSPGGT |
| | | VTLTCGSSTGAVTSGNYPNWVQQKPGQAPRGLIGGTKF |
| | | LAPGTPARFSGSLLGGKAALTLSGVQPEDEAEYYCVLW |
| | | YSNRWVFGGGTKLTVL |
| 266 | Bispecific scFc | QVQMVQSGAEVKKHGASVKVSCKASGYTFTGYYMHW |
| | molecule | VRQAPGQCLEWMGWINPNSGGTKYAQKFQGRVTMTR |
| | CL-2xI2C-scFc | DTSISTAYMELSRLRSDDTAVYYCARDRITVAGTYYYY |
| | | GMDVWGQGTTVTVSSGGGGSGGGGSGGGGSDIQMTQ |
| | | SPSSVSASVGDRVTITCRASQGVNNWLAWYQQKPGKA |
| | | PKLLIYTASSLQSGVPSRFSGSGSGTDFTLTIRSLQPEDFA |
| | | TYYCQQANSFPITFGCGTRLEIKSGGGGSEVQLVESGGG |
| | | LVQPGGSLKLSCAASGFTFNKYAMNWVRQAPGKGLE |
| | | WVARIRSKYNNYATYYADSVKDRFTISRDDSKNTAYL |
| | | QMNNLKTEDTAVYYCVRHGNFGNSYISYWAYWGQGT |
| | | LVTVSSGGGGSGGGGSGGGGSQTVVTQEPSLTVSPGGT |
| | | VTLTCGSSTGAVTSGNYPNWVQQKPGQAPRGLIGGTKF |
| | | LAPGTPARFSGSLLGGKAALTLSGVQPEDEAEYYCVLW |
| | | YSNRWVFGGGTKLTVLGGGGDKTHTCPPCPAPELLGGP |
| | | SVFLFPPKPKDTLMISRTPEVTCVVVDVSHEDPEVKFNW |
| | | YVDGVEVHNAKTKPCEEQYGSTYRCVSVLTVLHQDWL |
| | | NGKEYKCKVSNKALPAPIEKTISKAKGQPREPQVYTLPP |
| | | SREEMTKNQVSLTCLVKGFYPSDIAVEWESNGQPENNY |
| | | KTTPPVLDSDGSFFLYSKLTVDKSRWQQGNVFSCSVMH |
| | | EALHNHYTQKSLSLSPGKGGGGSGGGGSGGGGSGGGG |
| | | SGGGGSGGGGSDKTHTCPPCPAPELLGGPSVFLFPPKPK |
| | | DTLMISRTPEVTCVVVDVSHEDPEVKFNWYVDGVEVH |
| | | NAKTKPCEEQYGSTYRCVSVLTVLHQDWLNGKEYKCK |
| | | VSNKALPAPIEKTISKAKGQPREPQVYTLPPSREEMTKN |
| | | QVSLTCLVKGFYPSDIAVEWESNGQPENNYKTTPPVLD |
| | | SDGSFFLYSKLTVDKSRWQQGNVFSCSVMHEALHNHY |
| | | TQKSLSLSPGK |

MUC17

| | | |
|---|---|---|
| 267 | VH CDR1 MU-2-C2 | NHGMH |
| 268 | VH CDR2 MU-2-C2 | GIWSEGSNKYYADAVKG |
| 269 | VH CDR3 MU-2-C2 | ATYTTGWSYFDY |
| 270 | VL CDR1 MU-2-C2 | SGDKLGDKYAS |
| 271 | VL CDR2 MU-2-C2 | QDAKRPS |
| 272 | VL CDR3 MU-2-C2 | QAFHQSTWV |
| 273 | VH | QVQLVESGGGVVQPGRSLRLSCAASGFTFSNHGMHWV |
| | MU-2-C2 | RQAPGKCLEWVAGIWSEGSNKYYADAVKGRFTISRDN |
| | | SKNTLYLQMNSLRAEDTAVYYCARATYTTGWSYFDY |
| | | WGQGTLVTVSS |
| 274 | VL | SYELTQPPSVSVSPGQTASITCSGDKLGDKYASWYQQK |
| | MU-2-C2 | SGQSPVLVIYQDAKRPSGIPERFSGSNSGNTATLTISGTQ |
| | | AMDEADYYCQAFHQSTWVFGCGTQLTVL |
| 275 | bispecific | QVQLVESGGGVVQPGRSLRLSCAASGFTFSNHGMHWV |
| | molecule | RQAPGKCLEWVAGIWSEGSNKYYADAVKGRFTISRDN |
| | MU-2-C2 x CD3 - | SKNTLYLQMNSLRAEDTAVYYCARATYTTGWSYFDY |
| | scFc (MUC17 scFv | WGQGTLVTVSSGGGGSGGGGSGGGGSSYELTQPPSVSV |
| | underlined) | SPGQTASITCSGDKLGDKYASWYQQKSGQSPVLVIYQD |
| | | AKRPSGIPERFSGSNSGNTATLTISGTQAMDEADYYCQA |
| | | FHQSTWVFGCGTQLTVL |
| | | SGGGGSEVQLVESGGGLVQPGGSLKLSCAASGFTFNKY |
| | | AMNWVRQAPGKGLEWVARIRSKYNNYATYYADSVKD |
| | | RFTISRDDSKNTAYLQMNNLKTEDTAVYYCVRHGNFG |
| | | NSYISYWAYWGQGTLVTVSSGGGGSGGGGSGGGGSQT |
| | | VVTQEPSLTVSPGGTVTLTCGSSTGAVTSGNYPNWVQQ |
| | | KPGQAPRGLIGGTKFLAPGTPARFSGSLLGGKAALTLSG |
| | | VQPEDEAEYYCVLWYSNRWVFGGGTKLTVL |
| | | GGGGDKTHTCPPCPAPELLGGPSVFLFPPKPKDTLMISR |
| | | TPEVTCVVVDVSHEDPEVKFNWYVDGVEVHNAKTKPC |
| | | EEQYGSTYRCVSVLTVLHQDWLNGKEYKCKVSNKALP |
| | | APIEKTISKAKGQPREPQVYTLPPSREEMTKNQVSLTCL |
| | | VKGFYPSDIAVEWESNGQPENNYKTTPPVLDSDGSFFL |
| | | YSKLTVDKSRWQQGNVFSCSVMHEALHNHYTQKSLSL |
| | | SPGKGGGGSGGGGSGGGGSGGGGSGGGGSGGGGSDKT |
| | | HTCPPCPAPELLGGPSVFLFPPKPKDTLMISRTPEVTCVV |
| | | VDVSHEDPEVKFNWYVDGVEVHNAKTKPCEEQYGSTY |
| | | RCVSVLTVLHQDWLNGKEYKCKVSNKALPAPIEKTISK |
| | | AKGQPREPQVYTLPPSREEMTKNQVSLTCLVKGFYPSDI |
| | | AVEWESNGQPENNYKTTPPVLDSDGSFFLYSKLTVDKS |
| | | RWQQGNVFSCSVMHEALHNHYTQKSLSLSPGK |
| 276 | VH CDR1 | NHAMH |
| | MU-32-G6 | |
| 277 | VHCDR2 | GIWSEGSNKYYAESVKG |
| | MU-32-G6 | |
| 278 | VH CDR3 | ATYTTGWSYFDY |
| | MU-32-G6 | |
| 279 | VL CDR1 | SGDKLGDKYAS |
| | MU-32-G6 | |
| 280 | VL CDR2 | QDRKRPS |
| | MU-32-G6 | |
| 281 | VL CDR3 | QAYDASTWV |
| | MU-32-G6 | |
| 282 | VH | QVQLVESGGGVVQPGRSLRLSCAASGFTFSNHAMHWV |
| | MU-32-G6 | RQAPGKCLEWVAGIWSEGSNKYYAESVKGRFTISRDNS |
| | | KNTLYLQMNSLRAEDTAVYYCARATYTTGWSYFDYW |
| | | GQGTLVTVSS |
| 283 | VL | SYELTQPPSVSVSPGQTASITCSGDKLGDKYASWYQQK |
| | MU-32-G6 | SGQSPVLVIYQDRKRPSGIPERFSGSNSGNTATLTISGTQ |
| | | AMDEADYYCQAYDASTWVFGCGTQLTVL |
| 284 | bispecific | QVQLVESGGGVVQPGRSLRLSCAASGFTFSNHAMHWV |
| | molecule | RQAPGKCLEWVAGIWSEGSNKYYAESVKGRFTISRDNS |
| | MU-32-G6 x CD3 - | KNTLYLQMNSLRAEDTAVYYCARATYTTGWSYFDYW |
| | scFc (MUC17 scFv | GQGTLVTVSSGGGGSGGGGSGGGGSSYELTQPPSVSVS |
| | underlined) | PGQTASITCSGDKLGDKYASWYQQKSGQSPVLVIYQDR |
| | | KRPSGIPERFSGSNSGNTATLTISGTQAMDEADYYCQAY |
| | | DASTWVFGCGTQLTVL |
| | | SGGGGSEVQLVESGGGLVQPGGSLKLSCAASGFTFNKY |
| | | AMNWVRQAPGKGLEWVARIRSKYNNYATYYADSVKD |
| | | RFTISRDDSKNTAYLQMNNLKTEDTAVYYCVRHGNFG |
| | | NSYISYWAYWGQGTLVTVSSGGGGSGGGGSGGGGSQT |
| | | VVTQEPSLTVSPGGTVTLTCGSSTGAVTSGNYPNWVQQ |
| | | KPGQAPRGLIGGTKFLAPGTPARFSGSLLGGKAALTLSG |
| | | VQPEDEAEYYCVLWYSNRWVFGGGTKLTVLGGGGDK |
| | | THTCPPCPAPELLGGPSVFLFPPKPKDTLMISRTPEVTCV |
| | | VVDVSHEDPEVKFNWYVDGVEVHNAKTKPCEEQYGST |
| | | YRCVSVLTVLHQDWLNGKEYKCKVSNKALPAPIEKTIS |
| | | KAKGQPREPQVYTLPPSREEMTKNQVSLTCLVKGFYPS |
| | | DIAVEWESNGQPENNYKTTPPVLDSDGSFFLYSKLTVD |
| | | KSRWQQGNVFSCSVMHEALHNHYTQKSLSLSPGKGGG |
| | | GSGGGGSGGGGSGGGGSGGGGSGGGGSDKTHTCPPCP |
| | | APELLGGPSVFLFPPKPKDTLMISRTPEVTCVVVDVSHE |
| | | DPEVKFNWYVDGVEVHNAKTKPCEEQYGSTYRCVSVL |
| | | TVLHQDWLNGKEYKCKVSNKALPAPIEKTISKAKGQPR |
| | | EPQVYTLPPSREEMTKNQVSLTCLVKGFYPSDIAVEWES |
| | | NGQPENNYKTTPPVLDSDGSFFLYSKLTVDKSRWQQGN |
| | | VFSCSVMHEALHNHYTQKSLSLSPGK |
| 285 | VH CDR1 | GYYWS |
| | MU 8-B7 | |
| 286 | VH CDR2 | DIDASGSTKYNPSLKS |
| | MU 8-B7 | |
| 287 | VH CDR3 | KKYSTVWSYFDN |
| | MU 8-B7 | |
| 288 | VL CDR1 | SGDKLGDKYAS |
| | MU 8-B7 | |
| 289 | VL CDR2 | QDRKRPS |
| | MU 8-B7 | |
| 290 | VL CDR3 | QAWGSSTAV |
| | MU 8-B7 | |
| 291 | VH | QVQLQQWGAGLLKPSETLSLTCAVYGGSFSGYYWSWI |
| | MU 8-B7 | RQPPGKCLEWIGDIDASGSTKYNPSLKSRVTISLDTSKN |
| | | QFSLKLNSVTAADTAVYFCARKKYSTVWSYFDNWGQG |
| | | TLVTVSS |
| 292 | VL | SYELTQPSSVSVPPGQTASITCSGDKLGDKYASWYQQK |
| | MU 8-B7 | PGQSPVLVIYQDRKRPSGVPERFSGSNSGNTATLTISGTQ |
| | | AMDEADYYCQAWGSSTAVFGCGTKLTVL |
| 293 | bispecific | QVQLQQWGAGLLKPSETLSLTCAVYGGSFSGYYWSWI |
| | molecule | RQPPGKCLEWIGDIDASGSTKYNPSLKSRVTISLDTSKN |
| | MU 8-B7 x CD3 - scFc | QFSLKLNSVTAADTAVYFCARKKYSTVWSYFDNWGQG |
| | (MUC17 scFv | TLVTVSSGGGGSGGGGSGGGGSSYELTQPSSVSVPPGQ |
| | underlined) | TASITCSGDKLGDKYASWYQQKPGQSPVLVIYQDRKRP |
| | | SGVPERFSGSNSGNTATLTISGTQAMDEADYYCQAWGS |
| | | STAVFGCGTKLTVL |
| | | SGGGGSEVQLVESGGGLVQPGGSLKLSCAASGFTFNKY |
| | | AMNWVRQAPGKGLEWVARIRSKYNNYATYYADSVKD |
| | | RFTISRDDSKNTAYLQMNNLKTEDTAVYYCVRHGNFG |
| | | NSYISYWAYWGQGTLVTVSSGGGGSGGGGSGGGGSQT |
| | | VVTQEPSLTVSPGGTVTLTCGSSTGAVTSGNYPNWVQQ |
| | | KPGQAPRGLIGGTKFLAPGTPARFSGSLLGGKAALTLSG |
| | | VQPEDEAEYYCVLWYSNRWVFGGGTKLTVLGGGGDK |
| | | THTCPPCPAPELLGGPSVFLFPPKPKDTLMISRTPEVTCV |
| | | VVDVSHEDPEVKFNWYVDGVEVHNAKTKPCEEQYGST |
| | | YRCVSVLTVLHQDWLNGKEYKCKVSNKALPAPIEKTIS |
| | | KAKGQPREPQVYTLPPSREEMTKNQVSLTCLVKGFYPS |
| | | DIAVEWESNGQPENNYKTTPPVLDSDGSFFLYSKLTVD |
| | | KSRWQQGNVFSCSVMHEALHNHYTQKSLSLSPGKGGG |
| | | GSGGGGSGGGGSGGGGSGGGGSGGGGSDKTHTCPPCP |
| | | APELLGGPSVFLFPPKPKDTLMISRTPEVTCVVVDVSHE |
| | | DPEVKFNWYVDGVEVHNAKTKPCEEQYGSTYRCVSVL |
| | | TVLHQDWLNGKEYKCKVSNKALPAPIEKTISKAKGQPR |
| | | EPQVYTLPPSREEMTKNQVSLTCLVKGFYPSDIAVEWES |
| | | NGQPENNYKTTPPVLDSDGSFFLYSKLTVDKSRWQQGN |
| | | VFSCSVMHEALHNHYTQKSLSLSPGK |
| 294 | VH CDR1 | GYYWS |
| | MU 1-B6 | |
| 295 | VH CDR2 | DIDYSGSTKYNPSLKS |
| | MU 1-B6 | |
| 296 | VH CDR3 | KKYSTVWSYFDY |
| | MU 1-B6 | |
| 297 | VL CDR1 | SGDKLGDKYAN |
| | MU 1-B6 | |
| 298 | VL CDR2 | HDNKRPS |
| | MU 1-B6 | |
| 299 | VL CDR3 | QAYGISSAV |
| | MU 1-B6 | |
| 300 | VH | QVQLQQWGAGLLKPSETLSLTCAVYGGSFSGYYWSWI |
| | MU 1-B6 | RQPPGKCLEWIGDIDYSGSTKYNPSLKSRVTISLDTSKN |
| | | QFSLKLNSVTAADTAVYFCARKKYSTVWSYFDYWGQG |
| | | TLVTVSS |
| 301 | VL | SYELTQPASASVSPGQTASITCSGDKLGDKYANWYQQK |
| | MU 1-B6 | PGQSPILVIYHDNKRPSGIPERFSGSNSGNTATLTISGTQA |
| | | MDEADYYCQAYGISSAVFGCGTKLTVL |
| 302 | bispecific | QVQLQQWGAGLLKPSETLSLTCAVYGGSFSGYYWSWI |
| | molecule | RQPPGKCLEWIGDIDYSGSTKYNPSLKSRVTISLDTSKN |
| | MU 1-B6xCD3-scFc | QFSLKLNSVTAADTAVYFCARKKYSTVWSYFDYWGQG |
| | (MUC17 scFv | TLVTVSSGGGGSGGGGSGGGGSSYELTQPASASVSPGQ |
| | underlined) | TASITCSGDKLGDKYANWYQQKPGQSPILVIYHDNKRP |
| | | SGIPERFSGSNSGNTATLTISGTQAMDEADYYCQAYGIS |
| | | SAVFGCGTKLTVL |
| | | SGGGGSEVQLVESGGGLVQPGGSLKLSCAASGFTFNKY |
| | | AMNWVRQAPGKGLEWVARIRSKYNNYATYYADSVKD |
| | | RFTISRDDSKNTAYLQMNNLKTEDTAVYYCVRHGNFG |
| | | NSYISYWAYWGQGTLVTVSSGGGGSGGGGSGGGGSQT |
| | | VVTQEPSLTVSPGGTVTLTCGSSTGAVTSGNYPNWVQQ |
| | | KPGQAPRGLIGGTKFLAPGTPARFSGSLLGGKAALTLSG |
| | | VQPEDEAEYYCVLWYSNRWVFGGGTKLTVLGGGGDK |
| | | THTCPPCPAPELLGGPSVFLFPPKPKDTLMISRTPEVTCV |
| | | VVDVSHEDPEVKFNWYVDGVEVHNAKTKPCEEQYGST |
| | | YRCVSVLTVLHQDWLNGKEYKCKVSNKALPAPIEKTIS |
| | | KAKGQPREPQVYTLPPSREEMTKNQVSLTCLVKGFYPS |
| | | DIAVEWESNGQPENNYKTTPPVLDSDGSFFLYSKLTVD |
| | | KSRWQQGNVFSCSVMHEALHNHYTQKSLSLSPGKGGG |
| | | GSGGGGSGGGGSGGGGSGGGGSGGGGSDKTHTCPPCP |
| | | APELLGGPSVFLFPPKPKDTLMISRTPEVTCVVVDVSHE |
| | | DPEVKFNWYVDGVEVHNAKTKPCEEQYGSTYRCVSVL |
| | | TVLHQDWLNGKEYKCKVSNKALPAPIEKTISKAKGQPR |
| | | EPQVYTLPPSREEMTKNQVSLTCLVKGFYPSDIAVEWES |
| | | NGQPENNYKTTPPVLDSDGSFFLYSKLTVDKSRWQQGN |
| | | VFSCSVMHEALHNHYTQKSLSLSPGK |

CDH3

| | | |
|---|---|---|
| 303 | VH CDR1 CDH3 G8A | SYPIN |
| | 6-B12 | |
| 304 | VH CDR2 CDH3 G8A | VIWTGGGTNYASSVKG |
| | 6-B12 | |
| 305 | VH CDR3 CDH3 G8A | SRGVYDFDGRGAMDY |
| | 6-B12 | |
| 306 | VL CDR1 CDH3 G8A | KSSQSLLYSSNQKNYFA |
| | 6-B12 | |
| 307 | VL CDR2 CDH3 G8A | WASTRES |
| | 6-B12 | |
| 308 | VL CDR3 CDH3 G8A | QQYYSYPYT |
| | 6-B12 | |
| 309 | VH CDH3 G8A 6-B12 | EVQLLESGGGLVQPGGSLRLSCAASGFSFSSYPINWVRQ |
| | | APGKGLEWVGVIWTGGGTNYASSVKGRFTISRDNSKNT |
| | | VYLQMNSLRAEDTAVYYCAKSRGVYDFDGRGAMDY |
| | | WGQGTLVTVSS |
| 310 | VL CDH3 G8A 6-B12 | DIVMTQSPDSLAVSLGERATINCKSSQSLLYSSNQKNYF |
| | | AWYQQKPGQPPKLLIYWASTRESGVPDRFSGSGSGTDF |
| | | TLTISSLQAEDVAVYYCQQYYSYPYTFGQGTKLEIK |
| 311 | CDH3 G8A 6-B12 | EVQLLESGGGLVQPGGSLRLSCAASGFSFSSYPINWVRQ |
| | scFv | APGKGLEWVGVIWTGGGTNYASSVKGRFTISRDNSKNT |
| | | VYLQMNSLRAEDTAVYYCAKSRGVYDFDGRGAMDY |
| | | WGQGTLVTVSSGGGGSGGGGSGGGGSDIVMTQSPDSL |
| | | AVSLGERATINCKSSQSLLYSSNQKNYFAWYQQKPGQP |
| | | PKLLIYWASTRESGVPDRFSGSGSGTDFTLTISSLQAEDV |
| | | AVYYCQQYYSYPYTFGQGTKLEIK |
| 312 | CDH3 G8A 6-B12x | EVQLLESGGGLVQPGGSLRLSCAASGFSFSSYPINWVRQ |
| | CD3 bispecific | APGKGLEWVGVIWTGGGTNYASSVKGRFTISRDNSKNT |
| | molecule | VYLQMNSLRAEDTAVYYCAKSRGVYDFDGRGAMDY |
| | | WGQGTLVTVSSGGGGSGGGGSGGGGSDIVMTQSPDSL |
| | | AVSLGERATINCKSSQSLLYSSNQKNYFAWYQQKPGQP |
| | | PKLLIYWASTRESGVPDRFSGSGSGTDFTLTISSLQAEDV |
| | | AVYYCQQYYSYPYTFGQGTKLEIKSGGGGSEVQLVESG |
| | | GGLVQPGGSLKLSCAASGFTFNKYAMNWVRQAPGKGL |
| | | EWVARIRSKYNNYATYYADSVKDRFTISRDDSKNTAYL |
| | | QMNNLKTEDTAVYYCVRHGNFGNSYISYWAYWGQGT |
| | | LVTVSSGGGGSGGGGSGGGGSQTVVTQEPSLTVSPGGT |
| | | VTLTCGSSTGAVTSGNYPNWVQQKPGQAPRGLIGGTKF |
| | | LAPGTPARFSGSLLGGKAALTLSGVQPEDEAEYYCVLW |
| | | YSNRWVFGGGTKLTVL |
| 313 | CDH3 G8A 6-B12x | EVQLLESGGGLVQPGGSLRLSCAASGFSFSSYPINWVRQ |
| | I2C0 bispecific | APGKGLEWVGVIWTGGGTNYASSVKGRFTISRDNSKNT |
| | molecule HLE | VYLQMNSLRAEDTAVYYCAKSRGVYDFDGRGAMDY |
| | | WGQGTLVTVSSGGGGSGGGGSGGGGSDIVMTQSPDSL |
| | | AVSLGERATINCKSSQSLLYSSNQKNYFAWYQQKPGQP |
| | | PKLLIYWASTRESGVPDRFSGSGSGTDFTLTISSLQAEDV |
| | | AVYYCQQYYSYPYTFGQGTKLEIKSGGGGSEVQLVESG |
| | | GGLVQPGGSLKLSCAASGFTFNKYAMNWVRQAPGKGL |
| | | EWVARIRSKYNNYATYYADSVKDRFTISRDDSKNTAYL |
| | | QMNNLKTEDTAVYYCVRHGNFGNSYISYWAYWGQGT |
| | | LVTVSSGGGGSGGGGSGGGGSQTVVTQEPSLTVSPGGT |
| | | VTLTCGSSTGAVTSGNYPNWVQQKPGQAPRGLIGGTKF |
| | | LAPGTPARFSGSLLGGKAALTLSGVQPEDEAEYYCVLW |
| | | YSNRWVFGGGTKLTVLGGGGDKTHTCPPCPAPELLGGP |
| | | SVFLFPPKPKDTLMISRTPEVTCVVVDVSHEDPEVKFNW |
| | | YVDGVEVHNAKTKPCEEQYGSTYRCVSVLTVLHQDWL |
| | | NGKEYKCKVSNKALPAPIEKTISKAKGQPREPQVYTLPP |
| | | SREEMTKNQVSLTCLVKGFYPSDIAVEWESNGQPENNY |
| | | KTTPPVLDSDGSFFLYSKLTVDKSRWQQGNVFSCSVMH |
| | | EALHNHYTQKSLSLSPGKGGGGSGGGGSGGGGSGGGG |
| | | SGGGGSGGGGSDKTHTCPPCPAPELLGGPSVFLFPPKPK |
| | | DTLMISRTPEVTCVVVDVSHEDPEVKFNWYVDGVEVH |
| | | NAKTKPCEEQYGSTYRCVSVLTVLHQDWLNGKEYKCK |
| | | VSNKALPAPIEKTISKAKGQPREPQVYTLPPSREEMTKN |
| | | QVSLTCLVKGFYPSDIAVEWESNGQPENNYKTTPPVLD |
| | | SDGSFFLYSKLTVDKSRWQQGNVFSCSVMHEALHNHY |
| | | TQKSLSLSPGK |

CD19

| | | |
|---|---|---|
| 314 | CD19 VL CDR1 | KASQSVDYDGDSYLN |
| 315 | CD19 VL CDR2 | DASNLVS |
| 316 | CD19 VL CDR3 | QQSTEDPWT |
| 317 | CD19 VH CDR1 | SYWMN |
| 318 | CD19 VH CDR2 | QIWPGDGDTNYNGKFKG |
| 319 | CD19 VH CDR3 | RETTTVGRYYYAMDY |
| 320 | CD19 VL | DIQLTQSPASLAVSLGQRATISCKASQSVDYDGDSYLN |
| | | WYQQIPGQPPKLLIYDASNLVSGIPPRFSGSGSGTDFTLN |
| | | IHPVEKVDAATYHCQQSTEDPWTFGGGTKLEIK |
| 321 | CD19 VH | QVQLQQSGAELVRPGSSVKISCKASGYAFSSYWMNWV |
| | | KQRPGQGLEWIGQIWPGDGDTNYNGKFKGKATLTADE |
| | | SSSTAYMQLSSLASEDSAVYFCARRETTTVGRYYYAMD |
| | | YWGQGTTVTVSS |
| 322 | CD19 scFv | DIQLTQSPASLAVSLGQRATISCKASQSVDYDGDSYLN |
| | | WYQQIPGQPPKLLIYDASNLVSGIPPRFSGSGSGTDFTLN |
| | | IHPVEKVDAATYHCQQSTEDPWTFGGGTKLEIKGGGGS |
| | | GGGGSGGGGSQVQLQQSGAELVRPGSSVKISCKASGYA |
| | | FSSYWMNWVKQRPGQGLEWIGQIWPGDGDTNYNGKF |
| | | KGKATLTADESSSTAYMQLSSLASEDSAVYFCARRETT |
| | | TVGRYYYAMDYWGQGTTVTVSS |
| 323 | CD3 VH CDR1 | RYTMH |
| 324 | CD3 VH CDR2 | YINPSRGYTNYNQKFKD |
| 325 | CD3 VH CDR3 | YYDDHYCLDY |
| 326 | CD3 VL CDR1 | RASSSVSYMN |
| 327 | CD3 VL CDR2 | DTSKVAS |
| 328 | CD3 VL CDR3 | QQWSSNPLT |
| 329 | CD3 VH | DIKLQQSGAELARPGASVKMSCKTSGYTFTRYTMHWV |
| | | KQRPGQGLEWIGYINPSRGYTNYNQKFKDKATLTTDKS |
| | | SSTAYMQLSSLTSEDSAVYYCARYYDDHYCLDYWGQG |
| | | TTLTVSS |
| 330 | CD3 VL | VDDIQLTQSPAIMSASPGEKVTMTCRASSSVSYMNWYQ |
| | | QKSGTSPKRWIYDTSKVASGVPYRFSGSGSGTSYSLTISS |
| | | MEAEDAATYYCQQWSSNPLTFGAGTKLELK |
| 331 | CD3 scFv | DIKLQQSGAELARPGASVKMSCKTSGYTFTRYTMHWV |
| | | KQRPGQGLEWIGYINPSRGYTNYNQKFKDKATLTTDKS |
| | | SSTAYMQLSSLTSEDSAVYYCARYYDDHYCLDYWGQG |
| | | TTLTVSSVEGGSGGSGGSGGSGGVDDIQLTQSPAIMSAS |
| | | PGEKVTMTCRASSSVSYMNWYQQKSGTSPKRWIYDTS |
| | | KVASGVPYRFSGSGSGTSYSLTISSMEAEDAATYYCQQ |
| | | WSSNPLTFGAGTKLELK |
| 332 | CD19xCD3 scFv incl | DIQLTQSPASLAVSLGQRATISCKASQSVDYDGDSYLN |
| | linker and his-tag | WYQQIPGQPPKLLIYDASNLVSGIPPRFSGSGSGTDFTLN |
| | | IHPVEKVDAATYHCQQSTEDPWTFGGGTKLEIKGGGGS |
| | | GGGGSGGGGSQVQLQQSGAELVRPGSSVKISCKASGYA |
| | | FSSYWMNWVKQRPGQGLEWIGQIWPGDGDTNYNGKF |
| | | KGKATLTADESSSTAYMQLSSLASEDSAVYFCARRETT |
| | | TVGRYYYAMDYWGQGTTVTVSSGGGGSDIKLQQSGAE |
| | | LARPGASVKMSCKTSGYTFTRYTMHWVKQRPGQGLE |
| | | WIGYINPSRGYTNYNQKFKDKATLTTDKSSSTAYMQLS |
| | | SLTSEDSAVYYCARYYDDHYCLDYWGQGTTLTVSSVE |
| | | GGSGGSGGSGGSGGVDDIQLTQSPAIMSASPGEKVTMT |
| | | CRASSSVSYMNWYQQKSGTSPKRWIYDTSKVASGVPY |
| | | RFSGSGSGTSYSLTISSMEAEDAATYYCQQWSSNPLTFG |
| | | AGTKLELKHHHHHH |
| 333 | Peptide linker | GGGG |
| 334 | Peptide linker | GGGGS |
| 335 | Peptide linker | GGGGQ |
| 336 | Peptide linker | PGGGGS |
| 337 | Peptide linker | PGGDGS |
| 338 | Peptide linker | SGGGGS |
| 339 | Peptide linker | GGGGSGGGS |
| 340 | Peptide linker | GGGGSGGGGS |
| 341 | Peptide linker | GGGGSGGGGSGGGGS |
| 342 | Peptide linker | (GGGGS)x, x = 1, 2, 3, or 4 |
| 343 | Histidine tag | HHHHHH |
| 344 | scFc 1 | DKTHTCPPCP APELLGGPSV FLFPPKPKDT |
| | | LMISRTPEVT CVVVDVSHED PEVKFNWYVD |
| | | GVEVHNAKTK PCEEQYGSTY RCVSVLTVLH |
| | | QDWLNGKEYK CKVSNKALPA PIEKTISKAK |
| | | GQPREPQVYT LPPSREEMTK NQVSLTCLVK |
| | | GFYPSDIAVE WESNGQPENN YKTTPPVLDS |
| | | DGSFFLYSKL TVDKSRWQQG NVFSCSVMHE |
| | | ALHNHYTQKS LSLSPGKGGG GSGGGGSGGG |
| | | GSGGGGSGGG GSGGGGSDKT HTCPPCPAPE |
| | | LLGGPSVFLF PPKPKDTLMI SRTPEVTCVV |
| | | VDVSHEDPEV KFNWYVDGVE VHNAKTKPCE |
| | | EQYGSTYRCV SVLTVLHQDW LNGKEYKCKV |
| | | SNKALPAPIE KTISKAKGQP REPQVYTLPP |
| | | SREEMTKNQV SLTCLVKGFY PSDIAVEWES |
| | | NGQPENNYKT TPPVLDSDGS FFLYSKLTVD |
| | | KSRWQQGNVF SCSVMHEALH NHYTQKSLSL SPGK |
| 345 | scFc 2 | DKTHTCPPCP APELLGGPSV FLFPPKPKDT |
| | | LMISRTPEVT CVVVDVSHED PEVKFNWYVD |
| | | GVEVHNAKTK PCEEQYGSTY RCVSVLTVLH |
| | | QDWLNGKEYK CKVSNKALPA PIEKTISKAK |
| | | GQPREPQVYT LPPSREEMTK NQVSLTCLVK |
| | | GFYPSDIAVE WESNGQPENN YKTTPPVLDS |
| | | DGSFFLYSKL TVDKSRWQQG NVFSCSVMHE |
| | | ALHNHYTQKS LSLSPGGGGS GGGGSGGGGS |
| | | GGGGSGGGGS GGGGSDKTHT CPPCPAPELL |
| | | GGPSVFLFPP KPKDTLMISR TPEVTCVVVD |
| | | VSHEDPEVKF NWYVDGVEVH NAKTKPCEEQ |
| | | YGSTYRCVSV LTVLHQDWLN GKEYKCKVSN |
| | | KALPAPIEKT ISKAKGQPRE PQVYTLPPSR |
| | | EEMTKNQVSL TCLVKGFYPS DIAVEWESNG |
| | | QPENNYKTTP PVLDSDGSFF LYSKLTVDKS |
| | | RWQQGNVFSC SVMHEALHNH YTQKSLSLSP GK |

TABLE 16
Exemplary sequences of anti-CCR8 antibodies of the present invention.

| SEQ ID NO. | Description | Sequence |
|---|---|---|
| 346 | Antibody 1 IgG1 HCDR1 | NARMG |
| 347 | Antibody 1 IgG1 HCDR2 | RIKSKTEGGTRDYAAPVKG |
| 348 | Antibody 1 IgG1 HCDR3 | YSGV |
| 349 | Antibody 1 IgG1 LCDR1 | KSSQSVLYSSNNKNYLA |
| 350 | Antibody 1 IgG1 LCDR2 | WASTRES |
| 351 | Antibody 1 IgG1 LCDR3 | QQYYSIPIT |
| 352 | Antibody 1 IgG1 HCVR | EVQLVESGGGLVKPGGSLRLSCAASGFTFSNARM |
| | | GWVRQAPGKGLEWVGRIKSKTEGGTRDYAAPVKG |
| | | RFTISRDDSKNTLYLQMNSLKTEDTAVYYCTSYS |
| | | GVWGQGTMVTVSS |
| 353 | Antibody 1 IgG1 LCVR | DIVMTQSPDSLAVSLGERATINCKSSQSVLYSSN |
| | | NKNYLAWYHQKPGQSPKLLISWASTRESGVPDRF |
| | | SGSGSGTDFTLTINSLQAEDVAVYYCQQYYSIPI |
| | | TFGGGTKVEIKR |
| 354 | Antibody 1 IgG1 HC | EVQLVESGGGLVKPGGSLRLSCAASGFTFSNARM |
| | | GWVRQAPGKGLEWVGRIKSKTEGGTRDYAAPVKG |
| | | RFTISRDDSKNTLYLQMNSLKTEDTAVYYCTSYS |
| | | GVWGQGTMVTVSSASTKGPSVFPLAPSSKSTSGG |
| | | TAALGCLVKDYFPEPVTVSWNSGALTSGVHTFPA |
| | | VLQSSGLYSLSSVVTVPSSSLGTQTYICNVNHKP |
| | | SNTKVDKKVEPKSCDKTHTCPPCPAPELLGGPSV |
| | | FLFPPKPKDTLMISRTPEVTCVVVDVSHEDPEVK |
| | | FNWYVDGVEVHNAKTKPREEQYNSTYRVVSVLTV |
| | | LHQDWLNGKEYKCKVSNKALPAPIEKTISKAKGQ |
| | | PREPQVYTLPPSREEMTKNQVSLTCLVKGFYPSD |
| | | IAVEWESNGQPENNYKTTPPVLDSDGSFFLYSKL |
| | | TVDKSRWQQGNVFSCSVMHEALHNHYTQKSLSLS |
| | | PGK |
| 355 | Antibody 1 IgG1 LC | DIVMTQSPDSLAVSLGERATINCKSSQSVLYSSN |
| | | NKNYLAWYHQKPGQSPKLLISWASTRESGVPDRF |
| | | SGSGSGTDFTLTINSLQAEDVAVYYCQQYYSIPI |
| | | TFGGGTKVEIKRTVAAPSVFIFPPSDEQLKSGTA |
| | | SVVCLLNNFYPREAKVQWKVDNALQSGNSQESVT |
| | | EQDSKDSTYSLSSTLTLSKADYEKHKVYACEVTH |
| | | QGLSSPVTKSFNRGEC |
| 356 | Antibody 1.1 IgG1 (LC: H45Q_S51P) | NARMG |
| | HCDR1 | |
| 357 | Antibody 1.1 IgG1 (LC: H45Q_S51P) | RIKSKTEGGTRDYAAPVKG |
| | HCDR2 | |
| 358 | Antibody 1.1 IgG1 (LC: H45Q_S51P) | YSGV |
| | HCDR3 | |
| 359 | Antibody 1.1 IgG1 (LC: H45Q_S51P) | KSSQSVLYSSNNKNYLA |
| | LCDR1 | |
| 360 | Antibody 1.1 IgG1 (LC: H45Q_S51P) | WASTRES |
| | LCDR2 | |
| 361 | Antibody 1.1 IgG1 (LC: H45Q_S51P) | QQYYSIPIT |
| | LCDR3 | |
| 362 | Antibody 1.1 IgG1 (LC: H45Q_S51P) | EVQLVESGGGLVKPGGSLRLSCAASGFTFSNARM |
| | HCVR | GWVRQAPGKGLEWVGRIKSKTEGGTRDYAAPVKG |
| | | RFTISRDDSKNTLYLQMNSLKTEDTAVYYCTSYS |
| | | GVWGQGTMVTVSS |
| 363 | Antibody 1.1 IgG1 (LC: H45Q_S51P) | DIVMTQSPDSLAVSLGERATINCKSSQSVLYSSN |
| | LCVR | NKNYLAWYQQKPGQPPKLLISWASTRESGVPDRF |
| | | SGSGSGTDFTLTINSLQAEDVAVYYCQQYYSIPI |
| | | TFGGGTKVEIKR |
| 364 | Antibody 1.1 IgG1 (LC: H45Q_S51P) | EVQLVESGGGLVKPGGSLRLSCAASGFTFSNARM |
| | HC | GWVRQAPGKGLEWVGRIKSKTEGGTRDYAAPVKG |
| | | RFTISRDDSKNTLYLQMNSLKTEDTAVYYCTSYS |
| | | GVWGQGTMVTVSSASTKGPSVFPLAPSSKSTSGG |
| | | TAALGCLVKDYFPEPVTVSWNSGALTSGVHTFPA |
| | | VLQSSGLYSLSSVVTVPSSSLGTQTYICNVNHKP |
| | | SNTKVDKKVEPKSCDKTHTCPPCPAPELLGGPSV |
| | | FLFPPKPKDTLMISRTPEVTCVVVDVSHEDPEVK |
| | | FNWYVDGVEVHNAKTKPREEQYNSTYRVVSVLTV |
| | | LHQDWLNGKEYKCKVSNKALPAPIEKTISKAKGQ |
| | | PREPQVYTLPPSREEMTKNQVSLTCLVKGFYPSD |
| | | IAVEWESNGQPENNYKTTPPVLDSDGSFFLYSKL |
| | | TVDKSRWQQGNVFSCSVMHEALHNHYTQKSLSLS |
| | | PGK |
| 365 | Antibody 1.1 IgG1 (LC: H45Q_S51P) | DIVMTQSPDSLAVSLGERATINCKSSQSVLYSSN |
| | LC | NKNYLAWYQQKPGQPPKLLISWASTRESGVPDRF |
| | | SGSGSGTDFTLTINSLQAEDVAVYYCQQYYSIPI |
| | | TFGGGTKVEIKRTVAAPSVFIFPPSDEQLKSGTA |
| | | SVVCLLNNFYPREAKVQWKVDNALQSGNSQESVT |
| | | EQDSKDSTYSLSSTLTLSKADYEKHKVYACEVTH |
| | | QGLSSPVTKSFNRGEC |
| 366 | Antibody 2.1 IgG1 HCDR1 | NYGMH |
| | (LC: F2I_P51S_H53Q_L103V_N148K, | |
| | HC: K87N_S94N_V98A)(LC: Y25A_ | |
| | S26A, HC: A71I_D72R) | |
| 367 | Antibody 2.1 IgG1 HCDR2 | VISYDGSNKFYIRSVKG |
| | (LC: F2I_P51S_H53Q_L103V_N148K, | |
| | HC: K87N_S94N_V98A)(LC: Y25A_ | |
| | S26A, HC: A71I_D72R) | |
| 368 | Antibody 2.1 IgG1 HCDR3 | AGGIGRFDY |
| | (LC: F2I_P51S_H53Q_L103V_N148K, | |
| | HC: K87N_S94N_V98A)(LC: Y25A_ | |
| | S26A, HC: A71I_D72R) | |
| 369 | Antibody 2.1 IgG1 LCDR1 | KAAQSLLHSDGKTYLF |
| | (LC: F2I_P51S_H53Q_L103V_N148K, | |
| | HC: K87N_S94N_V98A)(LC: Y25A_ | |
| | S26A, HC: A71I_D72R) | |
| 370 | Antibody 2.1 IgG1 LCDR2 | EVSNRFS |
| | (LC: F2I_P51S_H53Q_L103V_N148K, | |
| | HC: K87N_S94N_V98A)(LC: Y25A_ | |
| | S26A, HC: A71I_D72R) | |
| 371 | Antibody 2.1 IgG1 LCDR3 | MQTLKLPLT |
| | (LC: F2I_P51S_H53Q_L103V_N148K, | |
| | HC: K87N_S94N_V98A)(LC: Y25A | |
| | S26A, HC: A71I D72R) | |
| 372 | Antibody 2.1 IgG1 HCVR | QVQLVESGGGVVQPGRSLRLSCAASGFTFSNYGM |
| | (LC: F2I_P51S_H53Q_L103V_N148 | HWVRQAPGKGLEWVAVISYDGSNKFYIRSVKGRF |
| | K, HC: K87N_S94N_V98A)(LC: Y25A_ | TISRDNSKNTLYLQMNSLRAEDTAVYYCARAGGI |
| | _S26A, HC: A71I_D72R) | GRFDYWGQGTLVTVSS |
| 373 | Antibody 2.1 IgG1 LCVR | DIVMTQTPLSLSVTPGQPASISCKAAQSLLHSDG |
| | (LC: F2I_P51S_H53Q_L103V_N148K, | KTYLFWYLQKPGQSPQLLIYEVSNRFSGVPDRFS |
| | HC: K87N_S94N_V98A)(LC: Y25A_ | GSGSGTDFTLKISRVEAEDVGVYYCMQTLKLPLT |
| | S26A, HC: A71I_D72R) | FGGGTKVEIKR |
| 374 | Antibody 2.1 IgG1 HC | QVQLVESGGGVVQPGRSLRLSCAASGFTFSNYGM |
| | (LC: F2I_P51S_H53Q_L103V_N148K, | HWVRQAPGKGLEWVAVISYDGSNKFYIRSVKGRF |
| | HC: K87N_S94N_V98A)(LC: Y25A_ | TISRDNSKNTLYLQMNSLRAEDTAVYYCARAGGI |
| | S26A, HC: A71I_D72R) | GRFDYWGQGTLVTVSSASTKGPSVFPLAPSSKST |
| | | SGGTAALGCLVKDYFPEPVTVSWNSGALTSGVHT |
| | | FPAVLQSSGLYSLSSVVTVPSSSLGTQTYICNVN |
| | | HKPSNTKVDKKVEPKSCDKTHTCPPCPAPELLGG |
| | | PSVFLFPPKPKDTLMISRTPEVTCVVVDVSHEDP |
| | | EVKFNWYVDGVEVHNAKTKPREEQYNSTYRVVSV |
| | | LTVLHQDWLNGKEYKCKVSNKALPAPIEKTISKA |
| | | KGQPREPQVYTLPPSREEMTKNQVSLTCLVKGFY |
| | | PSDIAVEWESNGQPENNYKTTPPVLDSDGSFFLY |
| | | SKLTVDKSRWQQGNVFSCSVMHEALHNHYTQKSL |
| | | SLSPGK |
| 375 | Antibody 2.1 IgG1 LC | DIVMTQTPLSLSVTPGQPASISCKAAQSLLHSDG |
| | (LC: F2I_P51S_H53Q_L103V_N148K, | KTYLFWYLQKPGQSPQLLIYEVSNRFSGVPDRFS |
| | HC: K87N_S94N_V98A)(LC: Y25A_ | GSGSGTDFTLKISRVEAEDVGVYYCMQTLKLPLT |
| | S26A, HC: A71I_D72R) | FGGGTKVEIKRTVAAPSVFIFPPSDEQLKSGTAS |
| | | VVCLLNNFYPREAKVQWKVDNALQSGNSQESVTE |
| | | QDSKDSTYSLSSTLTLSKADYEKHKVYACEVTHQ |
| | | GLSSPVTKSFNRGEC |
| 376 | Antibody 2.2 IgG1 HCDR1 | NYGMH |
| | (LC: F2I_P51S_H53Q_L103V_N148K, | |
| | HC: K87N_S94N_V98A)(LC: Y25A, | |
| | HC: A71L_D72K) | |
| 377 | Antibody 2.2 IgG1 HCDR2 | VISYDGSNKFYLKSVKG |
| | (LC: F2I_P51S_H53Q_L103V_N148K, | |
| | HC: K87N_S94N_V98A)(LC: Y25A, | |
| | HC: A71L_D72K) | |
| 378 | Antibody 2.2 IgG1 HCDR3 | AGGIGRFDY |
| | (LC: F2I_P51S_H53Q_L103V_N148K, | |
| | HC: K87N_S94N_V98A)(LC: Y25A, | |
| | HC: A71L_D72K) | |
| 379 | Antibody 2.2 IgG1 LCDR1 | KASQSLLHSDGKTYLF |
| | (LC: F2I_P51S_H53Q_L103V_N148K, | |
| | HC: K87N_S94N_V98A)(LC: Y25A, | |
| | HC: A71L_D72K) | |
| 380 | Antibody 2.2 IgG1 LCDR2 | EVSNRFS |
| | (LC: F2I_P51S_H53Q_L103V_N148K, | |
| | HC: K87N_S94N_V98A)(LC: Y25A, | |
| | HC: A71L_D72K) | |
| 381 | Antibody 2.2 IgG1 LCDR3 | MQTLKLPLT |
| | (LC: F2I_P51S_H53Q_L103V_N148K, | |
| | HC: K87N_S94N_V98A)(LC: Y25A, | |
| | HC: A71L_D72K) | |
| 382 | Antibody 2.2 IgG1 HCVR | QVQLVESGGGVVQPGRSLRLSCAASGFTFSNYGM |
| | (LC: F2I_P51S_H53Q_L103V_N148K, | HWVRQAPGKGLEWVAVISYDGSNKFYLKSVKGRF |
| | HC: K87N_S94N_V98A)(LC: Y25A, | TISRDNSKNTLYLQMNSLRAEDTAVYYCARAGGI |
| | HC: A71L_D72K) | GRFDYWGQGTLVTVSS |
| 383 | Antibody 2.2 IgG1 LCVR | DIVMTQTPLSLSVTPGQPASISCKASQSLLHSDG |
| | (LC: F2I_P51S_H53Q_L103V_N148K, | KTYLFWYLQKPGQSPQLLIYEVSNRFSGVPDRFS |
| | HC: K87N_S94N_V98A)(LC: Y25A, | GSGSGTDFTLKISRVEAEDVGVYYCMQTLKLPLT |
| | HC: A71L_D72K) | FGGGTKVEIKR |
| 384 | Antibody 2.2 IgG1 HC | QVQLVESGGGVVQPGRSLRLSCAASGFTFSNYGM |
| | (LC: F2I_P51S_H53Q_L103V_N148K, | HWVRQAPGKGLEWVAVISYDGSNKFYLKSVKGRF |
| | HC: K87N_S94N_V98A)(LC: Y25A, | TISRDNSKNTLYLQMNSLRAEDTAVYYCARAGGI |
| | HC: A71L_D72K) | GRFDYWGQGTLVTVSSASTKGPSVFPLAPSSKST |
| | | SGGTAALGCLVKDYFPEPVTVSWNSGALTSGVHT |
| | | FPAVLQSSGLYSLSSWTVPSSSLGTQTYICNVNH |
| | | KPSNTKVDKKVEPKSCDKTHTCPPCPAPELLGGP |
| | | SVFLFPPKPKDTLMISRTPEVTCVVVDVSHEDPE |
| | | VKFNWYVDGVEVHNAKTKPREEQYNSTYRVVSVL |
| | | TVLHQDWLNGKEYKCKVSNKALPAPIEKTISKAK |
| | | GQPREPQVYTLPPSREEMTKNQVSLTCLVKGFYP |
| | | SDIAVEWESNGQPENNYKTTPPVLDSDGSFFLYS |
| | | KLTVDKSRWQQGNVFSCSVMHEALHNHYTQKSLS |
| | | LSPGK |
| 385 | Antibody 2.2 IgG1 LC | DIVMTQTPLSLSVTPGQPASISCKASQSLLHSDG |
| | (LC: F2I_P51S_H53Q_L103V_N148K, | KTYLFWYLQKPGQSPQLLIYEVSNRFSGVPDRFS |
| | HC: K87N_S94N_V98A)(LC: Y25A, | GSGSGTDFTLKISRVEAEDVGVYYCMQTLKLPLT |
| | HC: A71L_D72K) | FGGGTKVEIKRTVAAPSVFIFPPSDEQLKSGTAS |
| | | VVCLLNNFYPREAKVQWKVDNALQSGNSQESVTE |
| | | QDSKDSTYSLSSTLTLSKADYEKHKVYACEVTHQ |
| | | GLSSPVTKSFNRGEC |
| 386 | Antibody 3.0 IgG1 HCDR1 | NAWMS |
| 387 | Antibody 3.0 IgG1 HCDR2 | RIKRRTDGGTTDYAAPVKD |
| 388 | Antibody 3.0 IgG1 HCDR3 | VTMVRGVIADY |
| 389 | Antibody 3.0 IgG1 LCDR1 | RASQSVSSGSLA |
| 390 | Antibody 3.0 IgG1 LCDR2 | GASSRAT |
| 391 | Antibody 3.0 IgG1 LCDR3 | QQYGSSRT |
| 392 | Antibody 3.0 IgG1 HCVR | EVQLVESGGGLVKPGGSLRLSCAASGFIFSNAWM |
| | | SWVRQAPGKGLEWVARIKRRTDGGTTDYAAPVKD |
| | | RFTISRDDSKNTLFLQMNSLKTEDTAVYYCTTVT |
| | | MVRGVIADYWGQGTLVTVSS |
| 393 | Antibody 3.0 IgG1 LCVR | EIVLTQSPGTLSLSPGERATLSCRASQSVSSGSL |
| | | AWYQQKLGQAPRLLIYGASSRATGIPDRFSGSGS |
| | | GTDFTLTISSLEPEDFAVYYCQQYGSSRTFGQGT |
| | | KVELKR |
| 394 | Antibody 3.0 IgG1 HC | EVQLVESGGGLVKPGGSLRLSCAASGFIFSNAWM |
| | | SWVRQAPGKGLEWVARIKRRTDGGTTDYAAPVKD |
| | | RFTISRDDSKNTLFLQMNSLKTEDTAVYYCTTVT |
| | | MVRGVIADYWGQGTLVTVSSASTKGPSVFPLAPS |
| | | SKSTSGGTAALGCLVKDYFPEPVTVSWNSGALTS |
| | | GVHTFPAVLQSSGLYSLSSVVTVPSSSLGTQTYI |
| | | CNVNHKPSNTKVDKKVEPKSCDKTHTCPPCPAPE |
| | | LLGGPSVFLFPPKPKDTLMISRTPEVTCVVVDVS |
| | | HEDPEVKFNWYVDGVEVHNAKTKPREEQYNSTYR |
| | | VVSVLTVLHQDWLNGKEYKCKVSNKALPAPIEKT |
| | | ISKAKGQPREPQVYTLPPSREEMTKNQVSLTCLV |
| | | KGFYPSDIAVEWESNGQPENNYKTTPPVLDSDGS |
| | | FFLYSKLTVDKSRWQQGNVFSCSVMHEALHNHYT |
| | | QKSLSLSPGK |
| 395 | Antibody 3.0 IgG1 LC | EIVLTQSPGTLSLSPGERATLSCRASQSVSSGSL |
| | | AWYQQKLGQAPRLLIYGASSRATGIPDRFSGSGS |
| | | GTDFTLTISSLEPEDFAVYYCQQYGSSRTFGQGT |
| | | KVELKRTVAAPSVFIFPPSDEQLKSGTASVVCLL |
| | | NNFYPREAKVQWKVDNALQSGNSQESVTEQDSKD |
| | | STYSLSSTLTLSKADYEKHKVYACEVTHQGLSSP |
| | | VTKSFNRGEC |
| 396 | Antibody 4.0 IgG1 HCDR1 | NAWMS |
| 397 | Antibody 4.0 IgG1 HCDR2 | RIKRKTDGGTTDYAAPVKG |
| 398 | Antibody 4.0 IgG1 HCDR3 | VTLVRGIIFDY |
| 399 | Antibody 4.0 IgG1 LCDR1 | RVSQSVSSSQLA |
| 400 | Antibody 4.0 IgG1 LCDR2 | GASSRAT |
| 401 | Antibody 4.0 IgG1 LCDR3 | QQYGNSRT |
| 402 | Antibody 4.0 IgG1 HCVR | EVQLVESGGGLVKPGGSLRLSCAASGFIFSNAWM |
| | | SWVRQAPGKGLEWVGRIKRKTDGGTTDYAAPVKG |
| | | RFTISRDDSKNTLYLLMNSLKIEDTAVYYCTVVT |
| | | LVRGIIFDYWGQGTLVTVSS |
| 403 | Antibody 4.0 IgG1 LCVR | EIVLTQSPGTLSLSPGESATLSCRVSQSVSSSQL |
| | | AWYQQKPGQAPRLLIYGASSRATGIPDRFSGSGS |
| | | GTDFTLTISRLEPEDFAVYYCQQYGNSRTFGQGT |
| | | KVEIKR |
| 404 | Antibody 4.0 IgG1 HC | EVQLVESGGGLVKPGGSLRLSCAASGFIFSNAWM |
| | | SWVRQAPGKGLEWVGRIKRKTDGGTTDYAAPVKG |
| | | RFTISRDDSKNTLYLLMNSLKIEDTAVYYCTVVT |
| | | LVRGIIFDYWGQGTLVTVSSASTKGPSVFPLAPS |
| | | SKSTSGGTAALGCLVKDYFPEPVTVSWNSGALTS |
| | | GVHTFPAVLQSSGLYSLSSWTVPSSSLGTQTYIC |
| | | NVNHKPSNTKVDKKVEPKSCDKTHTCPPCPAPEL |
| | | LGGPSVFLFPPKPKDTLMISRTPEVTCVVVDVSH |
| | | EDPEVKFNWYVDGVEVHNAKTKPREEQYNSTYRV |
| | | VSVLTVLHQDWLNGKEYKCKVSNKALPAPIEKTI |
| | | SKAKGQPREPQVYTLPPSREEMTKNQVSLTCLVK |
| | | GFYPSDIAVEWESNGQPENNYKTTPPVLDSDGSF |
| | | FLYSKLTVDKSRWQQGNVFSCSVMHEALHNHYTQ |
| | | KSLSLSPGK |
| 405 | Antibody 4.0 IgG1 LC | EIVLTQSPGTLSLSPGESATLSCRVSQSVSSSQL |
| | | AWYQQKPGQAPRLLIYGASSRATGIPDRFSGSGS |
| | | GTDFTLTISRLEPEDFAVYYCQQYGNSRTFGQGT |
| | | KVEIKRTVAAPSVFIFPPSDEQLKSGTASVVCLL |
| | | NNFYPREAKVQWKVDNALQSGNSQESVTEQDSKD |
| | | STYSLSSTLTLSKADYEKHKVYACEVTHQGLSSP |
| | | VTKSFNRGEC |
| 406 | Antibody 4.1 IgG1 HCDR1 | NAWLQ |
| | (VH: M41L_S42Q_L111R_V112S, VL: | |
| | S18R_S136P)_huIgG1z | |
| | mAb(LC: R18S, HC: G65Q_G66L) | |
| 407 | Antibody 4.1 IgG1 HCDR2 | RIKRKTDQLTTDYAAPVKG |
| | (VH: M41L_S42Q_L111R_V112S, VL: | |
| | S18R_S136P)_huIgG1z | |
| | mAb(LC: R18S, HC: G65Q G66L) | |
| 408 | Antibody 4.1 IgG1 HCDR3 | VTRSRGIIFDY |
| | (VH: M41L_S42Q_L111R_V112S, VL: | |
| | S18R_S136P)_huIgG1z | |
| | mAb(LC: R18S, HC: G65Q G66L) | |
| 409 | Antibody 4.1 IgG1 LCDR1 | RVSQSVSSSQLA |
| | (VH: M41L_S42Q_L111R_V112S, VL: | |
| | S18R_S136P)_huIgG1z | |
| | mAb(LC: R18S, HC: G65Q G66L) | |
| 410 | Antibody 4.1 IgG1 LCDR2 | GASSRAT |
| | (VH: M41L_S42Q_L111R_V112S, VL: | |
| | S18R_S136P)_huIgG1z | |
| | mAb(LC: R18S, HC: G65Q G66L) | |
| 411 | Antibody 4.1 IgG1 LCDR3 | QQYGNPRT |
| | (VH: M41L_S42Q_L111R_V112S, VL: | |
| | S18R_S136P)_huIgG1z | |
| | mAb(LC: R18S, HC: G65Q G66L) | |
| 412 | Antibody 4.1 IgG1 HCVR | EVQLVESGGGLVKPGGSLRLSCAASGFIFSNAWL |
| | (VH: M41L_S42Q_L111R_V112S, VL: | QWVRQAPGKGLEWVGRIKRKTDQLTTDYAAPVKG |
| | S18R_S136P)_huIgG1z | RFTISRDDSKNTLYLLMNSLKIEDTAVYYCTVVT |
| | mAb(LC: R18S, HC: G65Q_G66L) | RSRGIIFDYWGQGTLVTVSS |
| 413 | Antibody 4.1 IgG1 LCVR | EIVLTQSPGTLSLSPGESATLSCRVSQSVSSSQL |
| | (VH: M41L_S42Q_L111R_V112S, VL: | AWYQQKPGQAPRLLIYGASSRATGIPDRFSGSGS |
| | S18R_S136P)_huIgG1z | GTDFTLTISRLEPEDFAVYYCQQYGNPRTFGQGT |
| | mAb(LC: R18S, HC: G65Q_G66L) | KVEIKR |
| 414 | Antibody 4.1 IgG1 HC | EVQLVESGGGLVKPGGSLRLSCAASGFIFSNAWL |
| | (VH: M41L_S42Q_L111R_V112S, VL: | QWVRQAPGKGLEWVGRIKRKTDQLTTDYAAPVKG |
| | S18R_S136P)_huIgG1z | RFTISRDDSKNTLYLLMNSLKIEDTAVYYCTVVT |
| | mAb(LC: R18S, HC: G65Q_G66L) | RSRGIIFDYWGQGTLVTVSSASTKGPSVFPLAPS |
| | | SKSTSGGTAALGCLVKDYFPEPVTVSWNSGALTS |
| | | GVHTFPAVLQSSGLYSLSSVVTVPSSSLGTQTYI |
| | | CNVNHKPSNTKVDKKVEPKSCDKTHTCPPCPAPE |
| | | LLGGPSVFLFPPKPKDTLMISRTPEVTCVVVDVS |
| | | HEDPEVKFNWYVDGVEVHNAKTKPREEQYNSTYR |
| | | VVSVLTVLHQDWLNGKEYKCKVSNKALPAPIEKT |
| | | ISKAKGQPREPQVYTLPPSREEMTKNQVSLTCLV |
| | | KGFYPSDIAVEWESNGQPENNYKTTPPVLDSDGS |
| | | FFLYSKLTVDKSRWQQGNVFSCSVMHEALHNHYT |
| | | QKSLSLSPGK |
| 415 | Antibody 4.1 IgG1 LC | EIVLTQSPGTLSLSPGESATLSCRVSQSVSSSQL |
| | (VH: M41L_S42Q_L111R_V112S, VL: | AWYQQKPGQAPRLLIYGASSRATGIPDRFSGSGS |
| | S18R_S136P)_huIgG1z | GTDFTLTISRLEPEDFAVYYCQQYGNPRTFGQGT |
| | mAb(LC: R18S, HC: G65Q_G66L) | KVEIKRTVAAPSVFIFPPSDEQLKSGTASVVCLL |
| | | NNFYPREAKVQWKVDNALQSGNSQESVTEQDSKD |
| | | STYSLSSTLTLSKADYEKHKVYACEVTHQGLSSP |
| | | VTKSFNRGEC |
| 416 | Antibody 4.2 IgG1 HCDR1 | NAWLQ |
| | (VH: M41L_S42Q_L111R_V112S, VL: | |
| | S18R_S136P)_huIgG1z | |
| | mAb(LC: R18S, HC: G65A_G66S) | |
| 417 | Antibody 4.2 IgG1 HCDR2 | RIKRKTDASTTDYAAPVKG |
| | (VH: M41L_S42Q_L111R_V112S, VL: | |
| | S18R_S136P)_huIgG1z | |
| | mAb(LC: R18S, HC: G65A_G66S) | |
| 418 | Antibody 4.2 IgG1 HCDR3 | VTRSRGIIFDY |
| | (VH: M41L_S42Q_L111R_V112S, VL: | |
| | S18R_S136P)_huIgG1z | |
| | mAb(LC: R18S, HC: G65A_G66S) | |
| 419 | Antibody 4.2 IgG1 LCDR1 | RVSQSVSSSQLA |
| | (VH: M41L_S42Q_L111R_V112S, VL: | |
| | S18R_S136P)_huIgG1z | |
| | mAb(LC: R18S, HC: G65A_G66S) | |
| 420 | Antibody 4.2 IgG1 LCDR2 | GASSRAT |
| | (VH: M41L_S42Q_L111R_V112S, VL: | |
| | S18R_S136P)_huIgG1z | |
| | mAb(LC: R18S, HC: G65A_G66S) | |
| 421 | Antibody 4.2 IgG1 LCDR3 | QQYGNPRT |
| | (VH: M41L_S42Q_L111R_V112S, VL: | |
| | S18R_S136P)_huIgG1z | |
| | mAb(LC: R18S, HC: G65A_G66S) | |
| 422 | Antibody 4.2 IgG1 HCVR | EVQLVESGGGLVKPGGSLRLSCAASGFIFSNAWL |
| | (VH: M41L_S42Q_L111R_V112S, VL: | QWVRQAPGKGLEWVGRIKRKTDASTTDYAAPVKG |
| | S18R_S136P)_huIgG1z | RFTISRDDSKNTLYLLMNSLKIEDTAVYYCTVVT |
| | mAb(LC: R18S, HC: G65A_G66S) | RSRGIIFDYWGQGTLVTVSS |
| 423 | Antibody 4.2 IgG1 LCVR | EIVLTQSPGTLSLSPGESATLSCRVSQSVSSSQL |
| | (VH: M41L_S42Q_L111R_V112S, VL: | AWYQQKPGQAPRLLIYGASSRATGIPDRFSGSGS |
| | S18R_S136P)_huIgG1z | GTDFTLTISRLEPEDFAVYYCQQYGNPRTFGQGT |
| | mAb(LC: R18S, HC: G65A_G66S) | KVEIKR |
| 424 | Antibody 4.2 IgG1 HC | EVQLVESGGGLVKPGGSLRLSCAASGFIFSNAWL |
| | (VH: M41L_S42Q_L111R_V112S, VL: | QWVRQAPGKGLEWVGRIKRKTDASTTDYAAPVKG |
| | S18R_S136P)_huIgG1z | RFTISRDDSKNTLYLLMNSLKIEDTAVYYCTVVT |
| | mAb(LC: R18S, HC: G65A_G66S) | RSRGIIFDYWGQGTLVTVSSASTKGPSVFPLAPS |
| | | SKSTSGGTAALGCLVKDYFPEPVTVSWNSGALTS |
| | | GVHTFPAVLQSSGLYSLSSVVTVPSSSLGTQTYI |
| | | CNVNHKPSNTKVDKKVEPKSCDKTHTCPPCPAPE |
| | | LLGGPSVFLFPPKPKDTLMISRTPEVTCVVVDVS |
| | | HEDPEVKFNWYVDGVEVHNAKTKPREEQYNSTYR |
| | | VVSVLTVLHQDWLNGKEYKCKVSNKALPAPIEKT |
| | | ISKAKGQPREPQVYTLPPSREEMTKNQVSLTCLV |
| | | KGFYPSDIAVEWESNGQPENNYKTTPPVLDSDGS |
| | | FFLYSKLTVDKSRWQQGNVFSCSVMHEALHNHYT |
| | | QKSLSLSPGK |
| 425 | Antibody 4.2 IgG1 LC | EIVLTQSPGTLSLSPGESATLSCRVSQSVSSSQL |
| | (VH: M41L_S42Q_L111R_V112S, VL: | AWYQQKPGQAPRLLIYGASSRATGIPDRFSGSGS |
| | S18R_S136P)_huIgG1z | GTDFTLTISRLEPEDFAVYYCQQYGNPRTFGQGT |
| | mAb(LC: R18S, HC: G65A_G66S) | KVEIKRTVAAPSVFIFPPSDEQLKSGTASVVCLL |
| | | NNFYPREAKVQWKVDNALQSGNSQESVTEQDSKD |
| | | STYSLSSTLTLSKADYEKHKVYACEVTHQGLSSP |
| | | VTKSFNRGEC |
| 426 | Antibody 5.0 IgG1 HCDR1 | SYGMH |
| 427 | Antibody 5.0 IgG1 HCDR2 | VISYDGSNKYYADSVKG |
| 428 | Antibody 5.0 IgG1 HCDR3 | GRYFDWFLFDY |
| 429 | Antibody 5.0 IgG1 LCDR1 | KSSQSLLHSDGKTYLF |
| 430 | Antibody 5.0 IgG1 LCDR2 | EVSNRFS |
| 431 | Antibody 5.0 IgG1 LCDR3 | MQSLRLPLT |
| 432 | Antibody 5.0 IgG1 HCVR | QVQLVESGGGVVQPGRSLRLSCAASGFTFSSYGM |
| | | HWVRQAPGKGLEWVAVISYDGSNKYYADSVKGRF |
| | | TISRDNSKNTLYLQMNSLRAEDTAVYYCARGRYF |
| | | DWFLFDYWGQGTLVTVSS |
| 433 | Antibody 5.0 IgG1 LCVR | DTVMTQTPLSLSVTPGQPASISCKSSQSLLHSDG |
| | | KTYLFWYLQKPGQPPQLLISEVSNRFSGVPDRFS |
| | | GSGSGTDFTLKISRVEAEDVGFYYCMQSLRLPLT |
| | | FGGGTKVEIKR |
| 434 | Antibody 5.0 IgG1 HC | QVQLVESGGGVVQPGRSLRLSCAASGFTFSSYGM |
| | | HWVRQAPGKGLEWVAVISYDGSNKYYADSVKGRF |
| | | TISRDNSKNTLYLQMNSLRAEDTAVYYCARGRYF |
| | | DWFLFDYWGQGTLVTVSSASTKGPSVFPLAPSSK |
| | | STSGGTAALGCLVKDYFPEPVTVSWNSGALTSGV |
| | | HTFPAVLQSSGLYSLSSVVTVPSSSLGTQTYICN |
| | | VNHKPSNTKVDKKVEPKSCDKTHTCPPCPAPELL |
| | | GGPSVFLFPPKPKDTLMISRTPEVTCVVVDVSHE |
| | | DPEVKFNWYVDGVEVHNAKTKPREEQYNSTYRVV |
| | | SVLTVLHQDWLNGKEYKCKVSNKALPAPIEKTIS |
| | | KAKGQPREPQVYTLPPSREEMTKNQVSLTCLVKG |
| | | FYPSDIAVEWESNGQPENNYKTTPPVLDSDGSFF |
| | | LYSKLTVDKSRWQQGNVFSCSVMHEALHNHYTQK |
| | | SLSLSPGK |
| 435 | Antibody 5.0 IgG1 LC | DTVMTQTPLSLSVTPGQPASISCKSSQSLLHSDG |
| | | KTYLFWYLQKPGQPPQLLISEVSNRFSGVPDRFS |
| | | GSGSGTDFTLKISRVEAEDVGFYYCMQSLRLPLT |
| | | FGGGTKVEIKRTVAAPSVFIFPPSDEQLKSGTAS |
| | | VVCLLNNFYPREAKVQWKVDNALQSGNSQESVTE |
| | | QDSKDSTYSLSSTLTLSKADYEKHKVYACEVTHQ |
| | | GLSSPVTKSFNRGEC |
| 436 | Antibody 5.1 IgG1 HCDR1 | SYGMH |
| | (VH: F134T, VL: S34R_S57Y_F103V)_ | |
| | huIgG1z mAb | |
| 437 | Antibody 5.1 IgG1 HCDR2 | VISYDGSNKYYADSVKG |
| | (VH: F134T, VL: S34R_S57Y_F103V)_ | |
| | huIgG1z mAb | |
| 438 | Antibody 5.1 IgG1 HCDR3 | GRYFDWTLFDY |
| | (VH: F134T, VL: S34R_S57Y_F103V)__ | |
| | huIgG1z mAb | |
| 439 | Antibody 5.1 IgG1 LCDR1 | KSSQSLLHRDGKTYLF |
| | (VH: F134T, VL: S34R_S57Y_F103V) | |
| | huIgG1z mAb | |
| 440 | Antibody 5.1 IgG1 LCDR2 | EVSNRFS |
| | (VH: F134T, VL: S34R_S57Y_F103V)_ | |
| | huIgG1z mAb | |
| 441 | Antibody 5.1 IgG1 LCDR3 | MQSLRLPLT |
| | (VH: F134T, VL: S34R_S57Y_F103V)_ | |
| | huIgG1z mAb | |
| 442 | Antibody 5.1 IgG1 HCVR | QVQLVESGGGVVQPGRSLRLSCAASGFTFSSYGM |
| | (VH: F134T, VL: S34R_S57Y_F103V)_ | HWVRQAPGKGLEWVAVISYDGSNKYYADSVKGRF |
| | huIgG1z mAb | TISRDNSKNTLYLQMNSLRAEDTAVYYCARGRYF |
| | | DWTLFDYWGQGTLVTVSS |
| 443 | Antibody 5.1 IgG1 LCVR | DTVMTQTPLSLSVTPGQPASISCKSSQSLLHRDG |
| | (VH: F134T, VL: S34R_S57Y_F103V)_ | KTYLFWYLQKPGQPPQLLIYEVSNRFSGVPDRFS |
| | huIgG1z mAb | GSGSGTDFTLKISRVEAEDVGVYYCMQSLRLPLT |
| | | FGGGTKVEIKR |
| 444 | Antibody 5.1 IgG1 HC | QVQLVESGGGVVQPGRSLRLSCAASGFTFSSYGM |
| | (VH: F134T, VL: S34R_S57Y_F103V)_ | HWVRQAPGKGLEWVAVISYDGSNKYYADSVKGRF |
| | huIgG1z mAb | TISRDNSKNTLYLQMNSLRAEDTAVYYCARGRYF |
| | | DWTLFDYWGQGTLVTVSSASTKGPSVFPLAPSSK |
| | | STSGGTAALGCLVKDYFPEPVTVSWNSGALTSGV |
| | | HTFPAVLQSSGLYSLSSVVTVPSSSLGTQTYICN |
| | | VNHKPSNTKVDKKVEPKSCDKTHTCPPCPAPELL |
| | | GGPSVFLFPPKPKDTLMISRTPEVTCVVVDVSHE |
| | | DPEVKFNWYVDGVEVHNAKTKPREEQYNSTYRVV |
| | | SVLTVLHQDWLNGKEYKCKVSNKALPAPIEKTIS |
| | | KAKGQPREPQVYTLPPSREEMTKNQVSLTCLVKG |
| | | FYPSDIAVEWESNGQPENNYKTTPPVLDSDGSFF |
| | | LYSKLTVDKSRWQQGNVFSCSVMHEALHNHYTQK |
| | | SLSLSPGK |
| 445 | Antibody 5.1 IgG1 LC | DTVMTQTPLSLSVTPGQPASISCKSSQSLLHRDG |
| | (VH: F134T, VL: S34R_S57Y_F103V)_ | KTYLFWYLQKPGQPPQLLIYEVSNRFSGVPDRFS |
| | huIgG1z mAb | GSGSGTDFTLKISRVEAEDVGVYYCMQSLRLPLT |
| | | FGGGTKVEIKRTVAAPSVFIFPPSDEQLKSGTAS |
| | | VVCLLNNFYPREAKVQWKVDNALQSGNSQESVTE |
| | | QDSKDSTYSLSSTLTLSKADYEKHKVYACEVTHQ |
| | | GLSSPVTKSFNRGEC |
| 446 | Antibody 5.2 IgG1 HCDR1 | SYPMH |
| | (VH: G40PF134T, VL: S57Y_E58L_ | |
| | V67R_F103V)_huIgG1z mAb | |
| 447 | Antibody 5.2 IgG1 HCDR2 | VISYDGSNKYYADSVKG |
| | (VH: G40PF134T, VL: S57Y_E58L_ | |
| | V67R_F103V)_huIgG1z mAb | |
| 448 | Antibody 5.2 IgG1 HCDR3 | GRYFDWTLFDY |
| | (VH: G40PF134T, VL: S57_YE58L_ | |
| | V67R_F103V)_huIgG1z mAb | |
| 449 | Antibody 5.2 IgG1 LCDR1 | KSSQSLLHSDGKTYLF |
| | (VH: G40PF134T, VL: S57_YE58L_ | |
| | V67R_F103V)_huIgG1z mAb | |
| 450 | Antibody 5.2 IgG1 LCDR2 | LRSNRFS |
| | (VH: G40PF134T, VL: S57_YE58L_ | |
| | V67R_F103V)_huIgG1z mAb | |
| 451 | Antibody 5.2 IgG1 LCDR3 | MQSLRLPLT |
| | (VH: G40PF134T, VL: S57_YE58L_ | |
| | V67R F103V) huIgG1z mAb | |
| 452 | Antibody 5.2 IgG1 HCVR | QVQLVESGGGVVQPGRSLRLSCAASGFTFSSYPM |
| | (VH: G40PF134T, VL: S57Y_E58L_ | HWVRQAPGKGLEWVAVISYDGSNKYYADSVKGRF |
| | V67R_F103V)_huIgG1z mAb | TISRDNSKNTLYLQMNSLRAEDTAVYYCARGRYF |
| | | DWTLFDYWGQGTLVTVSS |
| 453 | Antibody 5.2 IgG1 LCVR | DTVMTQTPLSLSVTPGQPASISCKSSQSLLHSDG |
| | (VH: G40PF134T, VL: S57Y_E58L_ | KTYLFWYLQKPGQPPQLLIYLRSNRFSGVPDRFS |
| | V67R_F103V)_huIgG1z mAb | GSGSGTDFTLKISRVEAEDVGVYYCMQSLRLPLT |
| | | FGGGTKVEIKR |
| 454 | Antibody 5.2 IgG1 HC | QVQLVESGGGVVQPGRSLRLSCAASGFTFSSYPM |
| | (VH: G40PF134T, VL: S57Y_E58L_ | HWVRQAPGKGLEWVAVISYDGSNKYYADSVKGRF |
| | V67R_F103V)_huIgG1z mAb | TISRDNSKNTLYLQMNSLRAEDTAVYYCARGRYF |
| | | DWTLFDYWGQGTLVTVSSASTKGPSVFPLAPSSK |
| | | STSGGTAALGCLVKDYFPEPVTVSWNSGALTSGV |
| | | HTFPAVLQSSGLYSLSSVVTVPSSSLGTQTYICN |
| | | VNHKPSNTKVDKKVEPKSCDKTHTCPPCPAPELL |
| | | GGPSVFLFPPKPKDTLMISRTPEVTCVVVDVSHE |
| | | DPEVKFNWYVDGVEVHNAKTKPREEQYNSTYRVV |
| | | SVLTVLHQDWLNGKEYKCKVSNKALPAPIEKTIS |
| | | KAKGQPREPQVYTLPPSREEMTKNQVSLTCLVKG |
| | | FYPSDIAVEWESNGQPENNYKTTPPVLDSDGSFF |
| | | LYSKLTVDKSRWQQGNVFSCSVMHEALHNHYTQK |
| | | SLSLSPGK |
| 455 | Antibody 5.2 IgG1 LC | DTVMTQTPLSLSVTPGQPASISCKSSQSLLHSDG |
| | (VH: G40PF134T, VL: S57_YE58L_ | KTYLFWYLQKPGQPPQLLIYLRSNRFSGVPDRFS |
| | V67R_F103V)_huIgG1z mAb | GSGSGTDFTLKISRVEAEDVGVYYCMQSLRLPLT |
| | | FGGGTKVEIKRTVAAPSVFIFPPSDEQLKSGTAS |
| | | VVCLLNNFYPREAKVQWKVDNALQSGNSQESVTE |
| | | QDSKDSTYSLSSTLTLSKADYEKHKVYACEVTHQ |
| | | GLSSPVTKSFNRGEC |
| 456 | Antibody 5.3 IgG1 HCDR1 | SYGMH |
| | (VH: A71S_D72R, VL: S57Y_E58L_ | |
| | V67S_F103V)_huIgG1z mAb | |
| 457 | Antibody 5.3 IgG1 HCDR2 | VISYDGSNKYYSRSVKG |
| | (VH: A71S_D72R, VL: S57Y_E58L_ | |
| | V67S_F103V)_huIgG1z mAb | |
| 458 | Antibody 5.3 IgG1 HCDR3 | GRYFDWFLFDY |
| | (VH: A71S_D72R, VL: S57Y_E58L_ | |
| | V67S_F103V)_huIgG1z mAb | |
| 459 | Antibody 5.3 IgG1 LCDR1 | KSSQSLLHSDGKTYLF |
| | (VH: A71S_D72R, VL: S57Y_E58L_ | |
| | V67S_F103V)_huIgG1z mAb | |
| 460 | Antibody 5.3 IgG1 LCDR2 | LSSNRFS |
| | (VH: A71S_D72R, VL: S57Y_E58L_ | |
| | V67S_F103V)_huIgG1z mAb | |
| 461 | Antibody 5.3 IgG1 LCDR3 | MQSLRLPLT |
| | (VH: A71S_D72R, VL: S57Y_E58L_ | |
| | V67S_F103V)_huIgG1z mAb | |
| 462 | Antibody 5.3 IgG1 HCVR | QVQLVESGGGVVQPGRSLRLSCAASGFTFSSYGM |
| | (VH: A71S_D72R, VL: S57Y_E58L_ | HWVRQAPGKGLEWVAVISYDGSNKYYSRSVKGRF |
| | V67S_F103V)_huIgG1z mAb | TISRDNSKNTLYLQMNSLRAEDTAVYYCARGRYF |
| | | DWFLFDYWGQGTLVTVSS |
| 463 | Antibody 5.3 IgG1 LCVR | DTVMTQTPLSLSVTPGQPASISCKSSQSLLHSDG |
| | (VH: A71S_D72R, VL: S57Y_E58L_ | KTYLFWYLQKPGQPPQLLIYLSSNRFSGVPDRFS |
| | V67S_F103V)_huIgG1z mAb | GSGSGTDFTLKISRVEAEDVGVYYCMQSLRLPLT |
| | | FGGGTKVEIKR |
| 464 | Antibody 5.3 IgG1 HC | QVQLVESGGGVVQPGRSLRLSCAASGFTFSSYGM |
| | (VH: A71S_D72R, VL: S57Y_E58L_ | HWVRQAPGKGLEWVAVISYDGSNKYYSRSVKGRF |
| | V67S_F103V)_huIgG1z mAb | TISRDNSKNTLYLQMNSLRAEDTAVYYCARGRYF |
| | | DWFLFDYWGQGTLVTVSSASTKGPSVFPLAPSSK |
| | | STSGGTAALGCLVKDYFPEPVTVSWNSGALTSGV |
| | | HTFPAVLQSSGLYSLSSVVTVPSSSLGTQTYICN |
| | | VNHKPSNTKVDKKVEPKSCDKTHTCPPCPAPELL |
| | | GGPSVFLFPPKPKDTLMISRTPEVTCVVVDVSHE |
| | | DPEVKFNWYVDGVEVHNAKTKPREEQYNSTYRVV |
| | | SVLTVLHQDWLNGKEYKCKVSNKALPAPIEKTIS |
| | | KAKGQPREPQVYTLPPSREEMTKNQVSLTCLVKG |
| | | FYPSDIAVEWESNGQPENNYKTTPPVLDSDGSFF |
| | | LYSKLTVDKSRWQQGNVFSCSVMHEALHNHYTQK |
| | | SLSLSPGK |
| 465 | Antibody 5.3 IgG1 LC | DTVMTQTPLSLSVTPGQPASISCKSSQSLLHSDG |
| | (VH: A71S_D72R, VL: S57Y_E58L_ | KTYLFWYLQKPGQPPQLLIYLSSNRFSGVPDRFS |
| | V67S_F103V)_huIgG1z mAb | GSGSGTDFTLKISRVEAEDVGVYYCMQSLRLPLT |
| | | FGGGTKVEIKRTVAAPSVFIFPPSDEQLKSGTAS |
| | | VVCLLNNFYPREAKVQWKVDNALQSGNSQESVTE |
| | | QDSKDSTYSLSSTLTLSKADYEKHKVYACEVTHQ |
| | | GLSSPVTKSFNRGEC |
| 466 | Antibody 5.4 IgG1 HCDR1 | SYAMH |
| | (VH: G40A, VL: S57Y_E58L_V67T_ | |
| | F103V)_huIgG1z mAb | |
| 467 | Antibody 5.4 IgG1 HCDR2 | VISYDGSNKYYADSVKG |
| | (VH: G40A, VL: S57Y_E58L_V67T_ | |
| | F103V)_huIgG1z mAb | |
| 468 | Antibody 5.4 IgG1 HCDR3 | GRYFDWFLFDY |
| | (VH: G40A, VL: S57Y_E58L_V67T_ | |
| | F103V)_huIgG1z mAb | |
| 469 | Antibody 5.4 IgG1 LCDR1 | KSSQSLLHSDGKTYLF |
| | (VH: G40A, VL: S57Y_E58L_V67T_ | |
| | F103V)_huIgG1z mAb | |
| 470 | Antibody 5.4 IgG1 LCDR2 | LTSNRFS |
| | (VH: G40A, VL: S57Y_E58L_V67T_ | |
| | F103V)_huIgG1z mAb | |
| 471 | Antibody 5.4 IgG1 LCDR3 | MQSLRLPLT |
| | (VH: G40A, VL: S57Y_E58L_V67T_ | |
| | F103V)_huIgG1z mAb | |
| 472 | Antibody 5.4 IgG1 HCVR | QVQLVESGGGVVQPGRSLRLSCAASGFTFSSYAM |
| | (VH: G40A, VL: S57Y_E58L_V67T_ | HWVRQAPGKGLEWVAVISYDGSNKYYADSVKGRF |
| | F103V)_huIgG1z mAb | TISRDNSKNTLYLQMNSLRAEDTAVYYCARGRYF |
| | | DWFLFDYWGQGTLVTVSS |
| 473 | Antibody 5.4 IgG1 LCVR | DTVMTQTPLSLSVTPGQPASISCKSSQSLLHSDG |
| | (VH: G40A, VL: S57Y_E58L_V67T_ | KTYLFWYLQKPGQPPQLLIYLTSNRFSGVPDRFS |
| | F103V)_huIgG1z mAb | GSGSGTDFTLKISRVEAEDVGVYYCMQSLRLPLT |
| | | FGGGTKVEIKR |
| 474 | Antibody 5.4 IgG1 HC | QVQLVESGGGVVQPGRSLRLSCAASGFTFSSYAM |
| | (VH: G40A, VL: S57Y_E58L_V67T_ | HWVRQAPGKGLEWVAVISYDGSNKYYADSVKGRF |
| | F103V)_huIgG1z mAb | TISRDNSKNTLYLQMNSLRAEDTAVYYCARGRYF |
| | | DWFLFDYWGQGTLVTVSSASTKGPSVFPLAPSSK |
| | | STSGGTAALGCLVKDYFPEPVTVSWNSGALTSGV |
| | | HTFPAVLQSSGLYSLSSVVTVPSSSLGTQTYICN |
| | | VNHKPSNTKVDKKVEPKSCDKTHTCPPCPAPELL |
| | | GGPSVFLFPPKPKDTLMISRTPEVTCVVVDVSHE |
| | | DPEVKFNWYVDGVEVHNAKTKPREEQYNSTYRVV |
| | | SVLTVLHQDWLNGKEYKCKVSNKALPAPIEKTIS |
| | | KAKGQPREPQVYTLPPSREEMTKNQVSLTCLVKG |
| | | FYPSDIAVEWESNGQPENNYKTTPPVLDSDGSFF |
| | | LYSKLTVDKSRWQQGNVFSCSVMHEALHNHYTQK |
| | | SLSLSPGK |
| 475 | Antibody 5.4 IgG1 LC | DTVMTQTPLSLSVTPGQPASISCKSSQSLLHSDG |
| | (VH: G40A, VL: S57Y_E58L_V67T_ | KTYLFWYLQKPGQPPQLLIYLTSNRFSGVPDRFS |
| | F103V)_huIgG1z mAb | GSGSGTDFTLKISRVEAEDVGVYYCMQSLRLPLT |
| | | FGGGTKVEIKRTVAAPSVFIFPPSDEQLKSGTAS |
| | | VVCLLNNFYPREAKVQWKVDNALQSGNSQESVTE |
| | | QDSKDSTYSLSSTLTLSKADYEKHKVYACEVTHQ |
| | | GLSSPVTKSFNRGEC |
| 476 | Antibody 5.5 IgG1 HCDR1 | SYPVH |
| | (VH: G40P_M41V, VL: S57Y_E58L_ | |
| | V67T_F103V)_huIgG1z mAb | |
| 477 | Antibody 5.5 IgG1 HCDR2 | VISYDGSNKYYADSVKG |
| | (VH: G40P_M41V, VL: S57Y_E58L_ | |
| | V67T_F103V)_huIgG1z mAb | |
| 478 | Antibody 5.5 IgG1 HCDR3 | GRYFDWFLFDY |
| | (VH: G40P_M41V, VL: S57Y_E58L_ | |
| | V67T_F103V)_huIgG1z mAb | |
| 479 | Antibody 5.5 IgG1 LCDR1 | KSSQSLLHSDGKTYLF |
| | (VH: G40P_M41V, VL: S57Y_E58L_ | |
| | V67T_F103V)_huIgG1z mAb | |
| 480 | Antibody 5.5 IgG1 LCDR2 | LTSNRFS |
| | (VH: G40P_M41V, VL: S57Y_E58L_ | |
| | V67T F103V) huIgG1zmAb | |
| 481 | Antibody 5.5 IgG1 LCDR3 | MQSLRLPLT |
| | (VH: G40P_M41V, VL: S57Y_E58L_ | |
| | V67T_F103V)_huIgG1z mAb | |
| 482 | Antibody 5.5 IgG1 HCVR | QVQLVESGGGVVQPGRSLRLSCAASGFTFSSYPV |
| | (VH: G40P_M41V, VL: S57Y_E58L_ | HWVRQAPGKGLEWVAVISYDGSNKYYADSVKGRF |
| | V67T_F103V)_huIgG1z mAb | TISRDNSKNTLYLQMNSLRAEDTAVYYCARGRYF |
| | | DWFLFDYWGQGTLVTVSS |
| 483 | Antibody 5.5 IgG1 LCVR | DTVMTQTPLSLSVTPGQPASISCKSSQSLLHSDG |
| | (VH: G40P_M41V, VL: S57Y_E58L_ | KTYLFWYLQKPGQPPQLLIYLTSNRFSGVPDRFS |
| | V67T_F103V)_huIgG1z mAb | GSGSGTDFTLKISRVEAEDVGVYYCMQSLRLPLT |
| | | FGGGTKVEIKR |
| 484 | Antibody 5.5 IgG1 HC | QVQLVESGGGVVQPGRSLRLSCAASGFTFSSYPV |
| | (VH: G40P_M41V, VL: S57Y_E58L_ | HWVRQAPGKGLEWVAVISYDGSNKYYADSVKGRF |
| | V67T_F103V)_huIgG1z mAb | TISRDNSKNTLYLQMNSLRAEDTAVYYCARGRYF |
| | | DWFLFDYWGQGTLVTVSSASTKGPSVFPLAPSSK |
| | | STSGGTAALGCLVKDYFPEPVTVSWNSGALTSGV |
| | | HTFPAVLQSSGLYSLSSVVTVPSSSLGTQTYICN |
| | | VNHKPSNTKVDKKVEPKSCDKTHTCPPCPAPELL |
| | | GGPSVFLFPPKPKDTLMISRTPEVTCVVVDVSHE |
| | | DPEVKFNWYVDGVEVHNAKTKPREEQYNSTYRVV |
| | | SVLTVLHQDWLNGKEYKCKVSNKALPAPIEKTIS |
| | | KAKGQPREPQVYTLPPSREEMTKNQVSLTCLVKG |
| | | FYPSDIAVEWESNGQPENNYKTTPPVLDSDGSFF |
| | | LYSKLTVDKSRWQQGNVFSCSVMHEALHNHYTQK |
| | | SLSLSPGK |
| 485 | Antibody 5.5 IgG1 LC | DTVMTQTPLSLSVTPGQPASISCKSSQSLLHSDG |
| | (VH: G40P_M41V, VL: S57Y_E58L_ | KTYLFWYLQKPGQPPQLLIYLTSNRFSGVPDRFS |
| | V67T_F103V)_huIgG1z mAb | GSGSGTDFTLKISRVEAEDVGVYYCMQSLRLPLT |
| | | FGGGTKVEIKRTVAAPSVFIFPPSDEQLKSGTAS |
| | | VVCLLNNFYPREAKVQWKVDNALQSGNSQESVTE |
| | | QDSKDSTYSLSSTLTLSKADYEKHKVYACEVTHQ |
| | | GLSSPVTKSFNRGEC |
| 486 | Antibody 5.6 IgG1 HCDR1 | SYGMH |
| | (VH: F134T, VL: S34R_S57Y_F103V)_ | |
| | huIgG1z | |
| | mAb(LC: G37A K38R M107L) | |
| 487 | Antibody 5.6 IgG1 HCDR2 | VISYDGSNKYYADSVKG |
| | (VH: F134T, VL: S34R_S57Y_F103V)_ | |
| | huIgG1z | |
| | mAb(LC: G37A_K38R_M107L) | |
| 488 | Antibody 5.6 IgG1 HCDR3 | GRYFDWTLFDY |
| | (VH: F134T, VL: S34R_S57Y_F103V)_ | |
| | huIgG1z | |
| | mAb(LC: G37A_K38R_M107L) | |
| 489 | Antibody 5.6 IgG1 LCDR1 | KSSQSLLHRDARTYLF |
| | (VH: F134T, VL: S34R_S57Y_F103V)_ | |
| | huIgG1z | |
| | mAb(LC: G37A_K38R_M107L) | |
| 490 | Antibody 5.6 IgG1 LCDR2 | EVSNRFS |
| | (VH: F134T, VL: S34R_S57Y_F103V)_ | |
| | huIgG1z | |
| | mAb(LC: G37A_K38R_M107L) | |
| 491 | Antibody 5.6 IgG1 LCDR3 | LQSLRLPLT |
| | (VH: F134T, VL: S34R_S57Y_F103V)_ | |
| | huIgG1z | |
| | mAb(LC: G37A_K38R_M107L) | |
| 492 | Antibody 5.6 IgG1 HCVR | QVQLVESGGGVVQPGRSLRLSCAASGFTFSSYGM |
| | (VH: F134T, VL: S34R_S57Y_F103V)_ | HWVRQAPGKGLEWVAVISYDGSNKYYADSVKGRF |
| | huIgG1z | TISRDNSKNTLYLQMNSLRAEDTAVYYCARGRYF |
| | mAb(LC: G37A_K38R_M107L) | DWTLFDYWGQGTLVTVSS |
| 493 | Antibody 5.6 IgG1 LCVR | DTVMTQTPLSLSVTPGQPASISCKSSQSLLHRDA |
| | (VH: F134T, VL: S34R_S57Y_F103V)_ | RTYLFWYLQKPGQPPQLLIYEVSNRFSGVPDRFS |
| | huIgG1z | GSGSGTDFTLKISRVEAEDVGVYYCLQSLRLPLT |
| | mAb(LC: G37A_K38R_M107L) | FGGGTKVEIKR |
| 494 | Antibody 5.6 IgG1 HC | QVQLVESGGGVVQPGRSLRLSCAASGFTFSSYGM |
| | (VH: F134T, VL: S34R_S57Y_F103V)_ | HWVRQAPGKGLEWVAVISYDGSNKYYADSVKGRF |
| | huIgG1z | TISRDNSKNTLYLQMNSLRAEDTAVYYCARGRYF |
| | mAb(LC: G37A_K38R_M107L) | DWTLFDYWGQGTLVTVSSASTKGPSVFPLAPSSK |
| | | STSGGTAALGCLVKDYFPEPVTVSWNSGALTSGV |
| | | HTFPAVLQSSGLYSLSSVVTVPSSSLGTQTYICN |
| | | VNHKPSNTKVDKKVEPKSCDKTHTCPPCPAPELL |
| | | GGPSVFLFPPKPKDTLMISRTPEVTCVVVDVSHE |
| | | DPEVKFNWYVDGVEVHNAKTKPREEQYNSTYRVV |
| | | SVLTVLHQDWLNGKEYKCKVSNKALPAPIEKTIS |
| | | KAKGQPREPQVYTLPPSREEMTKNQVSLTCLVKG |
| | | FYPSDIAVEWESNGQPENNYKTTPPVLDSDGSFF |
| | | LYSKLTVDKSRWQQGNVFSCSVMHEALHNHYTQK |
| | | SLSLSPGK |
| 495 | Antibody 5.6 IgG1 LC | DTVMTQTPLSLSVTPGQPASISCKSSQSLLHRDA |
| | (VH: F134T, VL: S34R_S57Y_F103V)_ | RTYLFWYLQKPGQPPQLLIYEVSNRFSGVPDRFS |
| | huIgG1z | GSGSGTDFTLKISRVEAEDVGVYYCLQSLRLPLT |
| | mAb(LC: G37A_K38R_M107L) | FGGGTKVEIKRTVAAPSVFIFPPSDEQLKSGTAS |
| | | VVCLLNNFYPREAKVQWKVDNALQSGNSQESVTE |
| | | QDSKDSTYSLSSTLTLSKADYEKHKVYACEVTHQ |
| | | GLSSPVTKSFNRGEC |
| 496 | Antibody 5.7 IgG1 HCDR1 | SYGMH |
| | (VH: A71S_D72R, VL: S57Y_E58L_ | |
| | V67S_F103V)_huIgG1z | |
| | mAb(LC: G37A_K38R_M107L) | |
| 497 | Antibody 5.7 IgG1 HCDR2 | VISYDGSNKYYSRSVKG |
| | (VH: A71S_D72R, VL: S57Y_E58L_ | |
| | V67S_F103V)_huIgG1z | |
| | mAb(LC: G37A_K38R_M107L) | |
| 498 | Antibody 5.7 IgG1 HCDR3 | GRYFDWFLFDY |
| | (VH: A71S_D72R, VL: S57Y_E58L_ | |
| | V67S_F103V)_huIgG1z | |
| | mAb(LC: G37A_K38R_M107L) | |
| 499 | Antibody 5.7 IgG1 LCDR1 | KSSQSLLHSDARTYLF |
| | (VH: A71S_D72R, VL: S57Y_E58L_ | |
| | V67S_F103V)_huIgG1z | |
| | mAb(LC: G37A_K38R_M107L) | |
| 500 | Antibody 5.7 IgG1 LCDR2 | LSSNRFS |
| | (VH: A71S_D72R, VL: S57Y_E58L_ | |
| | V67S_F103V)_huIgG1z | |
| | mAb(LC: G37A_K38R_M107L) | |
| 501 | Antibody 5.7 IgG1 LCDR3 | LQSLRLPLT |
| | (VH: A71S_D72R, VL: S57Y_E58L_ | |
| | V67S_F103V)_huIgG1z | |
| | mAb(LC: G37A_K38R_M107L) | |
| 502 | Antibody 5.7 IgG1 HCVR | QVQLVESGGGVVQPGRSLRLSCAASGFTFSSYGM |
| | (VH: A71S_D72R, VL: S57Y_E58L_ | HWVRQAPGKGLEWVAVISYDGSNKYYSRSVKGRF |
| | V67S_F103V)_huIgG1z | TISRDNSKNTLYLQMNSLRAEDTAVYYCARGRYF |
| | mAb(LC: G37A_K38R_M107L) | DWFLFDYWGQGTLVTVSS |
| 503 | Antibody 5.7 IgG1 LCVR | DTVMTQTPLSLSVTPGQPASISCKSSQSLLHSDA |
| | (VH: A71S_D72R, VL: S57Y_E58L_ | RTYLFWYLQKPGQPPQLLIYLSSNRFSGVPDRFS |
| | V67S_F103V)_huIgG1z | GSGSGTDFTLKISRVEAEDVGVYYCLQSLRLPLT |
| | mAb(LC: G37A_K38R_M107L) | FGGGTKVEIKR |
| 504 | Antibody 5.7 IgG1 HC | QVQLVESGGGVVQPGRSLRLSCAASGFTFSSYGM |
| | (VH: A71S_D72R, VL: S57Y_E58L_ | HWVRQAPGKGLEWVAVISYDGSNKYYSRSVKGRF |
| | V67S_F103V)_huIgG1z | TISRDNSKNTLYLQMNSLRAEDTAVYYCARGRYF |
| | mAb(LC: G37A_K38R_M107L) | DWFLFDYWGQGTLVTVSSASTKGPSVFPLAPSSK |
| | | STSGGTAALGCLVKDYFPEPVTVSWNSGALTSGV |
| | | HTFPAVLQSSGLYSLSSVVTVPSSSLGTQTYICN |
| | | VNHKPSNTKVDKKVEPKSCDKTHTCPPCPAPELL |
| | | GGPSVFLFPPKPKDTLMISRTPEVTCVVVDVSHE |
| | | DPEVKFNWYVDGVEVHNAKTKPREEQYNSTYRVV |
| | | SVLTVLHQDWLNGKEYKCKVSNKALPAPIEKTIS |
| | | KAKGQPREPQVYTLPPSREEMTKNQVSLTCLVKG |
| | | FYPSDIAVEWESNGQPENNYKTTPPVLDSDGSFF |
| | | LYSKLTVDKSRWQQGNVFSCSVMHEALHNHYTQK |
| | | SLSLSPGK |
| 505 | Antibody 5.7 IgG1 LC | DTVMTQTPLSLSVTPGQPASISCKSSQSLLHSDA |
| | (VH: A71S_D72R, VL: S57Y_E58L_ | RTYLFWYLQKPGQPPQLLIYLSSNRFSGVPDRFS |
| | V67S_F103V)_huIgG1z | GSGSGTDFTLKISRVEAEDVGVYYCLQSLRLPLT |
| | mAb(LC: G37A_K38R_M107L) | FGGGTKVEIKRTVAAPSVFIFPPSDEQLKSGTAS |
| | | VVCLLNNFYPREAKVQWKVDNALQSGNSQESVTE |
| | | QDSKDSTYSLSSTLTLSKADYEKHKVYACEVTHQ |
| | | GLSSPVTKSFNRGEC |
| 506 | Antibody 5.8 IgG1 HCDR1 | SYPMH |
| | (VH: G40PF134T, VL: S57Y_E58L_ | |
| | 67R_F103V)_huIgG1z | |
| | mAb(LC: G37A_K38R_M107L) | |
| 507 | Antibody 5.8 IgG1 HCDR2 | VISYDGSNKYYADSVKG |
| | (VH: G40PF134T, VL: S57Y_E58L_ | |
| | V67R_F103V)_huIgG1z | |
| | mAb(LC: G37A_K38R_M107L) | |
| 508 | Antibody 5.8 IgG1 HCDR3 | GRYFDWTLFDY |
| | (VH: G40PF134T, VL: S57Y_E58L_ | |
| | V67R_F103V)_huIgG1z | |
| | mAb(LC: G37A_K38R_M107L) | |
| 509 | Antibody 5.8 IgG1 LCDR1 | KSSQSLLHSDARTYLF |
| | (VH: G40PF134T, VL: S57Y_E58L_ | |
| | V67R_F103V)_huIgG1z | |
| | mAb(LC: G37A_K38R_M107L) | |
| 510 | Antibody 5.8 IgG1 LCDR2 | LRSNRFS |
| | (VH: G40PF134T, VL: S57Y_E58L_ | |
| | V67R_F103V)_huIgG1z | |
| | mAb(LC: G37A_K38R_M107L) | |
| 511 | Antibody 5.8 IgG1 LCDR3 | LQSLRLPLT |
| | (VH: G40PF134T, VL: S57Y_E58L_ | |
| | V67R_F103V)_huIgG1z | |
| | mAb(LC: G37A_K38R_M107L) | |
| 512 | Antibody 5.8 IgG1 HCVR | QVQLVESGGGVVQPGRSLRLSCAASGFTFSSYPM |
| | (VH: G40PF134T, VL: S57Y_E58L_ | HWVRQAPGKGLEWVAVISYDGSNKYYADSVKGRF |
| | V67R_F103V)_huIgG1z | TISRDNSKNTLYLQMNSLRAEDTAVYYCARGRYF |
| | mAb(LC: G37A_K38R_M107L) | DWTLFDYWGQGTLVTVSS |
| 513 | Antibody 5.8 IgG1 LCVR | DTVMTQTPLSLSVTPGQPASISCKSSQSLLHSDA |
| | (VH: G40PF134T, VL: S57Y_E58L_ | RTYLFWYLQKPGQPPQLLIYLRSNRFSGVPDRFS |
| | V67R_F103V)_huIgG1z | GSGSGTDFTLKISRVEAEDVGVYYCLQSLRLPLT |
| | mAb(LC: G37A_K38R_M107L) | FGGGTKVEIKR |
| 514 | Antibody 5.8 IgG1 HC | QVQLVESGGGVVQPGRSLRLSCAASGFTFSSYPM |
| | (VH: G40PF134T, VL: S57Y_E58L_ | HWVRQAPGKGLEWVAVISYDGSNKYYADSVKGRF |
| | V67R_F103V)_huIgG1z | TISRDNSKNTLYLQMNSLRAEDTAVYYCARGRYF |
| | mAb(LC: G37A_K38R_M107L) | DWTLFDYWGQGTLVTVSSASTKGPSVFPLAPSSK |
| | | STSGGTAALGCLVKDYFPEPVTVSWNSGALTSGV |
| | | HTFPAVLQSSGLYSLSSVVTVPSSSLGTQTYICN |
| | | VNHKPSNTKVDKKVEPKSCDKTHTCPPCPAPELL |
| | | GGPSVFLFPPKPKDTLMISRTPEVTCVVVDVSHE |
| | | DPEVKFNWYVDGVEVHNAKTKPREEQYNSTYRVV |
| | | SVLTVLHQDWLNGKEYKCKVSNKALPAPIEKTIS |
| | | KAKGQPREPQVYTLPPSREEMTKNQVSLTCLVKG |
| | | FYPSDIAVEWESNGQPENNYKTTPPVLDSDGSFF |
| | | LYSKLTVDKSRWQQGNVFSCSVMHEALHNHYTQK |
| | | SLSLSPGK |
| 515 | Antibody 5.8 IgG1 LC | DTVMTQTPLSLSVTPGQPASISCKSSQSLLHSDA |
| | (VH: G40PF134T, VL: S57Y_E58L_ | RTYLFWYLQKPGQPPQLLIYLRSNRFSGVPDRFS |
| | V67R_F103V)_huIgG1z | GSGSGTDFTLKISRVEAEDVGVYYCLQSLRLPLT |
| | mAb(LC: G37A_K38R_M107L) | FGGGTKVEIKRTVAAPSVFIFPPSDEQLKSGTAS |
| | | VVCLLNNFYPREAKVQWKVDNALQSGNSQESVTE |
| | | QDSKDSTYSLSSTLTLSKADYEKHKVYACEVTHQ |
| | | GLSSPVTKSFNRGEC |
| 516 | Antibody 5.9 IgG1 HCDR1 | SYAMH |
| | (VH: G40A, VL: S57Y_E58L_V67T_ | |
| | F103V)_huIgG1z | |
| | mAb(LC: G37A_K38R_M107L) | |
| 517 | Antibody 5.9 IgG1 HCDR2 | VISYDGSNKYYADSVKG |
| | (VH: G40A, VL: S57Y_E58L_V67T_ | |
| | F103V)_huIgG1z | |
| | mAb(LC: G37A_K38R_M107L) | |
| 518 | Antibody 5.9 IgG1 HCDR3 | GRYFDWFLFDY |
| | (VH: G40A, VL: S57Y_E58L_V67T_ | |
| | F103V)_huIgG1z | |
| | mAb(LC: G37A_K38R_M107L) | |
| 519 | Antibody 5.9 IgG1 LCDR1 | KSSQSLLHSDARTYLF |
| | (VH: G40A, VL: S57Y_E58L_V67T_ | |
| | F103V)_huIgG1z | |
| | mAb(LC: G37A_K38R_M107L) | |
| 520 | Antibody 5.9 IgG1 LCDR2 | LTSNRFS |
| | (VH: G40A, VL: S57Y_E58L_V67T_ | |
| | F103V)_huIgG1z | |
| | mAb(LC: G37A_K38R_M107L) | |
| 521 | Antibody 5.9 IgG1 LCDR3 | LQSLRLPLT |
| | (VH: G40A, VL: S57Y_E58L_V67T_ | |
| | F103V)_huIgG1z | |
| | mAb(LC: G37A_K38R_M107L) | |
| 522 | Antibody 5.9 IgG1 HCVR | QVQLVESGGGVVQPGRSLRLSCAASGFTFSSYAM |
| | (VH: G40A, VL: S57Y E58L V67T_ | HWVRQAPGKGLEWVAVISYDGSNKYYADSVKGRF |
| | F103V)_huIgG1z | TISRDNSKNTLYLQMNSLRAEDTAVYYCARGRYF |
| | mAb(LC: G37A_K38R_M107L) | DWFLFDYWGQGTLVTVSS |
| 523 | Antibody 5.9 IgG1 LCVR | DTVMTQTPLSLSVTPGQPASISCKSSQSLLHSDA |
| | (VH: G40A, VL: S57Y_E58L_V67T_ | RTYLFWYLQKPGQPPQLLIYLTSNRFSGVPDRFS |
| | F103V)_huIgG1z | GSGSGTDFTLKISRVEAEDVGVYYCLQSLRLPLT |
| | mAb(LC: G37A_K38R_M107L) | FGGGTKVEIKR |
| 524 | Antibody 5.9 IgG1 HC | QVQLVESGGGVVQPGRSLRLSCAASGFTFSSYAM |
| | (VH: G40A, VL: S57Y_E58L_V67T_ | HWVRQAPGKGLEWVAVISYDGSNKYYADSVKGRF |
| | F103V)_huIgG1z | TISRDNSKNTLYLQMNSLRAEDTAVYYCARGRYF |
| | mAb(LC: G37A_K38R_M107L) | DWFLFDYWGQGTLVTVSSASTKGPSVFPLAPSSK |
| | | STSGGTAALGCLVKDYFPEPVTVSWNSGALTSGV |
| | | HTFPAVLQSSGLYSLSSVVTVPSSSLGTQTYICN |
| | | VNHKPSNTKVDKKVEPKSCDKTHTCPPCPAPELL |
| | | GGPSVFLFPPKPKDTLMISRTPEVTCVVVDVSHE |
| | | DPEVKFNWYVDGVEVHNAKTKPREEQYNSTYRVV |
| | | SVLTVLHQDWLNGKEYKCKVSNKALPAPIEKTIS |
| | | KAKGQPREPQVYTLPPSREEMTKNQVSLTCLVKG |
| | | FYPSDIAVEWESNGQPENNYKTTPPVLDSDGSFF |
| | | LYSKLTVDKSRWQQGNVFSCSVMHEALHNHYTQK |
| | | SLSLSPGK |
| 525 | Antibody 5.9 IgG1 LC | DTVMTQTPLSLSVTPGQPASISCKSSQSLLHSDA |
| | (VH: G40A, VL: S57Y_E58L_V67T_ | RTYLFWYLQKPGQPPQLLIYLTSNRFSGVPDRFS |
| | F103V)_huIgG1z | GSGSGTDFTLKISRVEAEDVGVYYCLQSLRLPLT |
| | mAb(LC: G37A_K38R_M107L) | FGGGTKVEIKRTVAAPSVFIFPPSDEQLKSGTAS |
| | | VVCLLNNFYPREAKVQWKVDNALQSGNSQESVTE |
| | | QDSKDSTYSLSSTLTLSKADYEKHKVYACEVTHQ |
| | | GLSSPVTKSFNRGEC |
| 526 | Antibody 6.0 IgG1 HCDR1 | SYVMH |
| 527 | Antibody 6.0 IgG1 HCDR2 | VISYDGSSQYYTDSVKG |
| 528 | Antibody 6.0 IgG1 HCDR2 | GRLATAILFDY |
| 529 | Antibody 6.0 IgG1 LCDR1 | KSSQSLLYSDGKTYLF |
| 530 | Antibody 6.0 IgG1 LCDR2 | EVSNRFS |
| 531 | Antibody 6.0 IgG1 LCDR3 | MQSIKLPLT |
| 532 | Antibody 6.0 IgG1 HCVR | QVQLVESGGGVVQPGRSLRLSCEASGFTFSSYVM |
| | | HWVRQAPGKGLEWVSVISYDGSSQYYTDSVKGRF |
| | | TISRDNSKNTLNLQMNSLRAEDTAVYYCVRGRLA |
| | | TAILFDYWGQGTLVTVSS |
| 533 | Antibody 6.0 IgG1 LCVR | DILMTQTPLSLSVTPGQPASISCKSSQSLLYSDG |
| | | KTYLFWYLQRPGQPPQLLIYEVSNRFSGVPDRFS |
| | | GSGSGTDFTLKISRVEAEDVGIYYCMQSIKLPLT |
| | | FGGGTKVEIKR |
| 534 | Antibody 6.0 IgG1 HC | QVQLVESGGGVVQPGRSLRLSCEASGFTFSSYVM |
| | | HWVRQAPGKGLEWVSVISYDGSSQYYTDSVKGRF |
| | | TISRDNSKNTLNLQMNSLRAEDTAVYYCVRGRLA |
| | | TAILFDYWGQGTLVTVSSASTKGPSVFPLAPSSK |
| | | STSGGTAALGCLVKDYFPEPVTVSWNSGALTSGV |
| | | HTFPAVLQSSGLYSLSSVVTVPSSSLGTQTYICN |
| | | VNHKPSNTKVDKKVEPKSCDKTHTCPPCPAPELL |
| | | GGPSVFLFPPKPKDTLMISRTPEVTCVVVDVSHE |
| | | DPEVKFNWYVDGVEVHNAKTKPREEQYNSTYRVV |
| | | SVLTVLHQDWLNGKEYKCKVSNKALPAPIEKTIS |
| | | KAKGQPREPQVYTLPPSREEMTKNQVSLTCLVKG |
| | | FYPSDIAVEWESNGQPENNYKTTPPVLDSDGSFF |
| | | LYSKLTVDKSRWQQGNVFSCSVMHEALHNHYTQK |
| | | SLSLSPGK |
| 535 | Antibody 6.0 IgG1 LC | DILMTQTPLSLSVTPGQPASISCKSSQSLLYSDG |
| | | KTYLFWYLQRPGQPPQLLIYEVSNRFSGVPDRFS |
| | | GSGSGTDFTLKISRVEAEDVGIYYCMQSIKLPLT |
| | | FGGGTKVEIKRTVAAPSVFIFPPSDEQLKSGTAS |
| | | VVCLLNNFYPREAKVQWKVDNALQSGNSQESVTE |
| | | QDSKDSTYSLSSTLTLSKADYEKHKVYACEVTHQ |
| | | GLSSPVTKSFNRGEC |
| 536 | Antibody 6.1 IgG1 HCDR1 | SYVMH |
| | (VH: S67R_A114S_I134P, VL: F71L)_ | |
| | huIgG1z mAb | |
| 537 | Antibody 6.1 IgG1 HCDR2 | VISYDGSRQYYTDSVKG |
| | (VH: S67R_A114S_I134P, VL: F71L)_ | |
| | huIgG1z mAb | |
| 538 | Antibody 6.1 IgG1 HCDR3 | GRLATSPLFDY |
| | (VH: S67R_A114S_I134P, VL: F71L)_ | |
| | huIgG1z mAb | |
| 539 | Antibody 6.1 IgG1 LCDR1 | KSSQSLLYSDGKTYLF |
| | (VH: S67R_A114S_I134P, VL: F71L)_ | |
| | huIgG1z mAb | |
| 540 | Antibody 6.1 IgG1 LCDR2 | EVSNRLS |
| | (VH: S67R_A114S_I134P, VL: F71L)_ | |
| | huIgG1z mAb | |
| 541 | Antibody 6.1 IgG1 LCDR3 | MQSIKLPLT |
| | (VH: S67R_A114S_I134P, VL: F71L)_ | |
| | huIgG1z mAb | |
| 542 | Antibody 6.1 IgG1 HCVR | QVQLVESGGGVVQPGRSLRLSCEASGFTFSSYVM |
| | (VH: S67R_A114S_I134P, VL: F71L)_ | HWVRQAPGKGLEWVSVISYDGSRQYYTDSVKGRF |
| | huIgG1z mAb | TISRDNSKNTLNLQMNSLRAEDTAVYYCVRGRLA |
| | | TSPLFDYWGQGTLVTVSS |
| 543 | Antibody 6.1 IgG1 LCVR | DILMTQTPLSLSVTPGQPASISCKSSQSLLYSDG |
| | (VH: S67R_A114S_I134P, VL: F71L)_ | KTYLFWYLQRPGQPPQLLIYEVSNRLSGVPDRFS |
| | huIgG1z mAb | GSGSGTDFTLKISRVEAEDVGIYYCMQSIKLPLT |
| | | FGGGTKVEIKR |
| 544 | Antibody 6.1 IgG1 HC | QVQLVESGGGVVQPGRSLRLSCEASGFTFSSYVM |
| | (VH: S67R_A114S_I134P, VL: F71L)_ | HWVRQAPGKGLEWVSVISYDGSRQYYTDSVKGRF |
| | huIgG1z mAb | TISRDNSKNTLNLQMNSLRAEDTAVYYCVRGRLA |
| | | TSPLFDYWGQGTLVTVSSASTKGPSVFPLAPSSK |
| | | STSGGTAALGCLVKDYFPEPVTVSWNSGALTSGV |
| | | HTFPAVLQSSGLYSLSSVVTVPSSSLGTQTYICN |
| | | VNHKPSNTKVDKKVEPKSCDKTHTCPPCPAPELL |
| | | GGPSVFLFPPKPKDTLMISRTPEVTCVVVDVSHE |
| | | DPEVKFNWYVDGVEVHNAKTKPREEQYNSTYRVV |
| | | SVLTVLHQDWLNGKEYKCKVSNKALPAPIEKTIS |
| | | KAKGQPREPQVYTLPPSREEMTKNQVSLTCLVKG |
| | | FYPSDIAVEWESNGQPENNYKTTPPVLDSDGSFF |
| | | LYSKLTVDKSRWQQGNVFSCSVMHEALHNHYTQK |
| | | SLSLSPGK |
| 545 | Antibody 6.1 IgG1 LC | DILMTQTPLSLSVTPGQPASISCKSSQSLLYSDG |
| | (VH: S67R_A114S_I134P, VL: F71L)_ | KTYLFWYLQRPGQPPQLLIYEVSNRLSGVPDRFS |
| | huIgG1z mAb | GSGSGTDFTLKISRVEAEDVGIYYCMQSIKLPLT |
| | | FGGGTKVEIKRTVAAPSVFIFPPSDEQLKSGTAS |
| | | VVCLLNNFYPREAKVQWKVDNALQSGNSQESVTE |
| | | QDSKDSTYSLSSTLTLSKADYEKHKVYACEVTHQ |
| | | GLSSPVTKSFNRGEC |
| 546 | Antibody 6.2 IgG1 HCDR1 | SYVMH |
| | (VH: S67R_Q68A_L135K_F136L, VL: | |
| | S109T_I110L) huIgG1z mAb | |
| 547 | Antibody 6.2 IgG1 HCDR2 | VISYDGSRAYYTDSVKG |
| | (VH: S67R_Q68A_L135K_F136L, VL: | |
| | S109T_I110L) huIgG1z mAb | |
| 548 | Antibody 6.2 IgG1 HCDR3 | GRLATAIKLDY |
| | (VH: S67R_Q68A_L135K_F136L, VL: | |
| | S109T_I110L) huIgG1z mAb | |
| 549 | Antibody 6.2 IgG1 LCDR1 | KSSQSLLYSDGKTYLF |
| | (VH: S67R_Q68A_L135K_F136L, VL: | |
| | S109T_I110L) huIgG1z mAb | |
| 550 | Antibody 6.2 IgG1 LCDR2 | EVSNRFS |
| | (VH: S67R_Q68A_L135K_F136L, VL: | |
| | S109T_I110L) huIgG1z mAb | |
| 551 | Antibody 6.2 IgG1 LCDR3 | MQTLKLPLT |
| | (VH: S67R_Q68A_L135K_F136L, VL: | |
| | S109T_I110L) huIgG1z mAb | |
| 552 | Antibody 6.2 IgG1 HCVR | QVQLVESGGGVVQPGRSLRLSCEASGFTFSSYVM |
| | (VH: S67R_Q68A_L135K_F136L, VL: | HWVRQAPGKGLEWVSVISYDGSRAYYTDSVKGRF |
| | S109T_1110L)_huIgG1z mAb | TISRDNSKNTLNLQMNSLRAEDTAVYYCVRGRLA |
| | | TAIKLDYWGQGTLVTVSS |
| 553 | Antibody 6.2 IgG1 LCVR | DILMTQTPLSLSVTPGQPASISCKSSQSLLYSDG |
| | (VH: S67R_Q68A_L135K_F136L, VL: | KTYLFWYLQRPGQPPQLLIYEVSNRFSGVPDRFS |
| | S109T_1110L)_huIgG1z mAb | GSGSGTDFTLKISRVEAEDVGIYYCMQTLKLPLT |
| | | FGGGTKVEIKR |
| 554 | Antibody 6.2 IgG1 HC | QVQLVESGGGVVQPGRSLRLSCEASGFTFSSYVM |
| | (VH: S67R_Q68A_L135K_F136L, VL: | HWVRQAPGKGLEWVSVISYDGSRAYYTDSVKGRF |
| | S109T_1110L)_huIgG1z mAb | TISRDNSKNTLNLQMNSLRAEDTAVYYCVRGRLA |
| | | TAIKLDYWGQGTLVTVSSASTKGPSVFPLAPSSK |
| | | STSGGTAALGCLVKDYFPEPVTVSWNSGALTSGV |
| | | HTFPAVLQSSGLYSLSSWTVPSSSLGTQTYICNV |
| | | NHKPSNTKVDKKVEPKSCDKTHTCPPCPAPELLG |
| | | GPSVFLFPPKPKDTLMISRTPEVTCVVVDVSHED |
| | | PEVKFNWYVDGVEVHNAKTKPREEQYNSTYRVVS |
| | | VLTVLHQDWLNGKEYKCKVSNKALPAPIEKTISK |
| | | AKGQPREPQVYTLPPSREEMTKNQVSLTCLVKGF |
| | | YPSDIAVEWESNGQPENNYKTTPPVLDSDGSFFL |
| | | YSKLTVDKSRWQQGNVFSCSVMHEALHNHYTQKS |
| | | LSLSPGK |
| 555 | Antibody 6.2 IgG1 LC | DILMTQTPLSLSVTPGQPASISCKSSQSLLYSDG |
| | (VH: S67R_Q68A_L135K_F136L, VL: | KTYLFWYLQRPGQPPQLLIYEVSNRFSGVPDRFS |
| | S109T_1110L)_huIgG1z mAb | GSGSGTDFTLKISRVEAEDVGIYYCMQTLKLPLT |
| | | FGGGTKVEIKRTVAAPSVFIFPPSDEQLKSGTAS |
| | | VVCLLNNFYPREAKVQWKVDNALQSGNSQESVTE |
| | | QDSKDSTYSLSSTLTLSKADYEKHKVYACEVTHQ |
| | | GLSSPVTKSFNRGEC |

Cynomolgus monkey Mauritian origin T4R CCR8
(SEQ ID NO: 556)
MDYRLDPSMTTMTDYYYPDSLSSPCDGELIQRNDKLLLAVFYCLLFVFS
LLGNSLVILVLVVCKKLRNITDIYLLNLALSDLLFVFSFPFQTYYQLDQ
WVFGTVMCKVVSGFYYIGFYSSMFFITLMSVDRYLAVVHAVYAIKVRTI
RMGTTLSLVVWLTAIMATIPLLVFYQVASEDGVLQCYSFYNQQTLKWKI
FTNFEMNILGLLIPFTIFMFCYIKILHQLKRCQNHNKTKAIRLVLIVVI
ASLLFWVPFNVVLFLTSLHSMHILDGCSISQQLNYATHVTEIISFTHCC
VNPVIYAFVGEKFKKHLSEIFQKSCSHIFIYLGRQMPRESCEKSSSCQQ
HSFRSSSIDYIL
Leader sequence
(SEQ ID NO: 557)
MDMRVPAQLLGLLLLWLRGARC
DNA encoding leader sequence of SEQ ID NO: 557
(SEQ ID NO: 558)
atggacatgagagtgcctgcacagctgctgggcctgctgctgctgtggc
tgagaggcgccagatgc
Leader sequence
(SEQ ID NO: 559)
MAWALLLLTLLTQGTGSWA
DNA encoding leader sequence of SEQ ID NO: 559
(SEQ ID NO: 560)
atggcctgggctctgctgctcctcaccctcctcactcagggcacagggt
cctgggcc
TCE1 CCR8 HCDR1
(SEQ ID NO: 561)
NARMG
TCE1 CCR8 HCDR2
(SEQ ID NO: 562)
RIKSKTEGGTRDYAAPVKG
TCE1 CCR8 HCDR3
(SEQ ID NO: 563)
YSGV
TCE1 CCR8 LCDR1
(SEQ ID NO: 564)
KSSQSVLYSSNNKNYLA
TCE1 CCR8 LCDR2
(SEQ ID NO: 565)
WASTRES
TCE1 CCR8 LCDR3
(SEQ ID NO: 566)
QQYYSIPIT
TCE2 CCR8 HCDR1
(SEQ ID NO: 567)
NYGMH
TCE2 CCR8 HCDR2
(SEQ ID NO: 568)
VISYDGSNKFYADSVKG
TCE2 CCR8 HCDR3
(SEQ ID NO: 569)
AGGIGRFDY
TCE2 CCR8 LCDR1
(SEQ ID NO: 570)
KYSQSLLHSDGKTYLF
TCE2 CCR8 LCDR2
(SEQ ID NO: 571)
EVSNRFS
TCE2 CCR8 LCDR3
(SEQ ID NO: 572)
MQTLKLPLT

TABLE 17
Exemplary sequences of HCs without the C-terminal lysine
of antibodies of the present invention.

| SEQ ID NO: | Designation | Sequence |
|---|---|---|
| 573 | Antibody 1 IgG1 HC | EVQLVESGGGLVKPGGSLRLSCAASGFTFSNARMGWVRQAPGKG |
| | | LEWVGRIKSKTEGGTRDYAAPVKGRFTISRDDSKNTLYLQMNSL |
| | | KTEDTAVYYCTSYSGVWGQGTMVTVSSASTKGPSVFPLAPSSKS |
| | | TSGGTAALGCLVKDYFPEPVTVSWNSGALTSGVHTFPAVLQSSG |
| | | LYSLSSVVTVPSSSLGTQTYICNVNHKPSNTKVDKKVEPKSCDK |
| | | THTCPPCPAPELLGGPSVFLFPPKPKDTLMISRTPEVTCVVVDV |
| | | SHEDPEVKFNWYVDGVEVHNAKTKPREEQYNSTYRVVSVLTVLH |
| | | QDWLNGKEYKCKVSNKALPAPIEKTISKAKGQPREPQVYTLPPS |
| | | REEMTKNQVSLTCLVKGFYPSDIAVEWESNGQPENNYKTTPPVL |
| | | DSDGSFFLYSKLTVDKSRWQQGNVFSCSVMHEALHNHYTQKSLS |
| | | LSPG |
| 574 | Antibody 1.1 IgG1 | EVQLVESGGGLVKPGGSLRLSCAASGFTFSNARMGWVRQAPGKG |
| | (LC: H45Q_S51P) HC | LEWVGRIKSKTEGGTRDYAAPVKGRFTISRDDSKNTLYLQMNSL |
| | | KTEDTAVYYCTSYSGVWGQGTMVTVSSASTKGPSVFPLAPSSKS |
| | | TSGGTAALGCLVKDYFPEPVTVSWNSGALTSGVHTFPAVLQSSG |
| | | LYSLSSVVTVPSSSLGTQTYICNVNHKPSNTKVDKKVEPKSCDK |
| | | THTCPPCPAPELLGGPSVFLFPPKPKDTLMISRTPEVTCVVVDV |
| | | SHEDPEVKFNWYVDGVEVHNAKTKPREEQYNSTYRVVSVLTVLH |
| | | QDWLNGKEYKCKVSNKALPAPIEKTISKAKGQPREPQVYTLPPS |
| | | REEMTKNQVSLTCLVKGFYPSDIAVEWESNGQPENNYKTTPPVL |
| | | DSDGSFFLYSKLTVDKSRWQQGNVFSCSVMHEALHNHYTQKSLS |
| | | LSPG |
| 575 | Antibody 2.1 IgG1 HC | QVQLVESGGGVVQPGRSLRLSCAASGFTFSNYGMHWVRQAPGKG |
| | (LC: F2I_P51S_H53Q_ | LEWVAVISYDGSNKFYIRSVKGRFTISRDNSKNTLYLQMNSLRA |
| | L103V_N148K, HC: K87N_ | EDTAVYYCARAGGIGRFDYWGQGTLVTVSSASTKGPSVFPLAPS |
| | S94N_V98A)(LC: | SKSTSGGTAALGCLVKDYFPEPVTVSWNSGALTSGVHTFPAVLQ |
| | Y25A_S26A, HC: A71I_ | SSGLYSLSSVVTVPSSSLGTQTYICNVNHKPSNTKVDKKVEPKS |
| | D72R) | CDKTHTCPPCPAPELLGGPSVFLFPPKPKDTLMISRTPEVTCVV |
| | | VDVSHEDPEVKFNWYVDGVEVHNAKTKPREEQYNSTYRVVSVLT |
| | | VLHQDWLNGKEYKCKVSNKALPAPIEKTISKAKGQPREPQVYTL |
| | | PPSREEMTKNQVSLTCLVKGFYPSDIAVEWESNGQPENNYKTTP |
| | | PVLDSDGSFFLYSKLTVDKSRWQQGNVFSCSVMHEALHNHYTQK |
| | | SLSLSPG |
| 576 | Antibody 2.2 IgG1 HC | QVQLVESGGGVVQPGRSLRLSCAASGFTFSNYGMHWVRQAPGKG |
| | (LC: F2I_P51S_H53Q_ | LEWVAVISYDGSNKFYLKSVKGRFTISRDNSKNTLYLQMNSLRA |
| | L103V_N148K, HC: K87N_ | EDTAVYYCARAGGIGRFDYWGQGTLVTVSSASTKGPSVFPLAPS |
| | S94N_V98A)(LC: | SKSTSGGTAALGCLVKDYFPEPVTVSWNSGALTSGVHTFPAVLQ |
| | Y25A, HC: A71L_D72K) | SSGLYSLSSVVTVPSSSLGTQTYICNVNHKPSNTKVDKKVEPKS |
| | | CDKTHTCPPCPAPELLGGPSVFLFPPKPKDTLMISRTPEVTCVV |
| | | VDVSHEDPEVKFNWYVDGVEVHNAKTKPREEQYNSTYRVVSVLT |
| | | VLHQDWLNGKEYKCKVSNKALPAPIEKTISKAKGQPREPQVYTL |
| | | PPSREEMTKNQVSLTCLVKGFYPSDIAVEWESNGQPENNYKTTP |
| | | PVLDSDGSFFLYSKLTVDKSRWQQGNVFSCSVMHEALHNHYTQK |
| | | SLSLSPG |
| 577 | Antibody 3.0 IgG1 HC | EVQLVESGGGLVKPGGSLRLSCAASGFIFSNAWMSWVRQAPGKG |
| | | LEWVARIKRRTDGGTTDYAAPVKDRFTISRDDSKNTLFLQMNSL |
| | | KTEDTAVYYCTTVTMVRGVIADYWGQGTLVTVSSASTKGPSVFP |
| | | LAPSSKSTSGGTAALGCLVKDYFPEPVTVSWNSGALTSGVHTFP |
| | | AVLQSSGLYSLSSVVTVPSSSLGTQTYICNVNHKPSNTKVDKKV |
| | | EPKSCDKTHTCPPCPAPELLGGPSVFLFPPKPKDTLMISRTPEV |
| | | TCVVVDVSHEDPEVKFNWYVDGVEVHNAKTKPREEQYNSTYRVV |
| | | SVLTVLHQDWLNGKEYKCKVSNKALPAPIEKTISKAKGQPREPQ |
| | | VYTLPPSREEMTKNQVSLTCLVKGFYPSDIAVEWESNGQPENNY |
| | | KTTPPVLDSDGSFFLYSKLTVDKSRWQQGNVFSCSVMHEALHNH |
| | | YTQKSLSLSPG |
| 578 | Antibody 4.0 IgG1 HC | EVQLVESGGGLVKPGGSLRLSCAASGFIFSNAWMSWVRQAPGKG |
| | | LEWVGRIKRKTDGGTTDYAAPVKGRFTISRDDSKNTLYLLMNSL |
| | | KIEDTAVYYCTVVTLVRGIIFDYWGQGTLVTVSSASTKGPSVFP |
| | | LAPSSKSTSGGTAALGCLVKDYFPEPVTVSWNSGALTSGVHTFP |
| | | AVLQSSGLYSLSSVVTVPSSSLGTQTYICNVNHKPSNTKVDKKV |
| | | EPKSCDKTHTCPPCPAPELLGGPSVFLFPPKPKDTLMISRTPEV |
| | | TCVVVDVSHEDPEVKFNWYVDGVEVHNAKTKPREEQYNSTYRVV |
| | | SVLTVLHQDWLNGKEYKCKVSNKALPAPIEKTISKAKGQPREPQ |
| | | VYTLPPSREEMTKNQVSLTCLVKGFYPSDIAVEWESNGQPENNY |
| | | KTTPPVLDSDGSFFLYSKLTVDKSRWQQGNVFSCSVMHEALHNH |
| | | YTQKSLSLSPG |
| 579 | Antibody 4.1 IgG1 HC | EVQLVESGGGLVKPGGSLRLSCAASGFIFSNAWLQWVRQAPGKG |
| | (VH: M41L_S42Q_L111R_ | LEWVGRIKRKTDQLTTDYAAPVKGRFTISRDDSKNTLYLLMNSL |
| | V112S, VL: S18R_S136P)_ | KIEDTAVYYCTVVTRSRGIIFDYWGQGTLVTVSSASTKGPSVFP |
| | huIgG1z | LAPSSKSTSGGTAALGCLVKDYFPEPVTVSWNSGALTSGVHTFP |
| | mAb(LC: R18S, HC: G65Q_ | AVLQSSGLYSLSSVVTVPSSSLGTQTYICNVNHKPSNTKVDKKV |
| | G66L) | EPKSCDKTHTCPPCPAPELLGGPSVFLFPPKPKDTLMISRTPEV |
| | | TCVVVDVSHEDPEVKFNWYVDGVEVHNAKTKPREEQYNSTYRVV |
| | | SVLTVLHQDWLNGKEYKCKVSNKALPAPIEKTISKAKGQPREPQ |
| | | VYTLPPSREEMTKNQVSLTCLVKGFYPSDIAVEWESNGQPENNY |
| | | KTTPPVLDSDGSFFLYSKLTVDKSRWQQGNVFSCSVMHEALHNH |
| | | YTQKSLSLSPG |
| 580 | Antibody 4.2 IgG1 HC | EVQLVESGGGLVKPGGSLRLSCAASGFIFSNAWLQWVRQAPGKG |
| | (VH: M41L_S42Q_L111R_ | LEWVGRIKRKTDASTTDYAAPVKGRFTISRDDSKNTLYLLMNSL |
| | V112S, VL: S18R_S136P)_ | KIEDTAVYYCTVVTRSRGIIFDYWGQGTLVTVSSASTKGPSVFP |
| | huIgG1z | LAPSSKSTSGGTAALGCLVKDYFPEPVTVSWNSGALTSGVHTFP |
| | mAb(LC: R18S, HC: G6 | AVLQSSGLYSLSSVVTVPSSSLGTQTYICNVNHKPSNTKVDKKV |
| | 5A_G66S) | EPKSCDKTHTCPPCPAPELLGGPSVFLFPPKPKDTLMISRTPEV |
| | | TCVVVDVSHEDPEVKFNWYVDGVEVHNAKTKPREEQYNSTYRVV |
| | | SVLTVLHQDWLNGKEYKCKVSNKALPAPIEKTISKAKGQPREPQ |
| | | VYTLPPSREEMTKNQVSLTCLVKGFYPSDIAVEWESNGQPENNY |
| | | KTTPPVLDSDGSFFLYSKLTVDKSRWQQGNVFSCSVMHEALHNH |
| | | YTQKSLSLSPG |
| 581 | Antibody 5.0 IgG1 HC | QVQLVESGGGVVQPGRSLRLSCAASGFTFSSYGMHWVRQAPGKG |
| | | LEWVAVISYDGSNKYYADSVKGRFTISRDNSKNTLYLQMNSLRA |
| | | EDTAVYYCARGRYFDWFLFDYWGQGTLVTVSSASTKGPSVFPLA |
| | | PSSKSTSGGTAALGCLVKDYFPEPVTVSWNSGALTSGVHTFPAV |
| | | LQSSGLYSLSSVVTVPSSSLGTQTYICNVNHKPSNTKVDKKVEP |
| | | KSCDKTHTCPPCPAPELLGGPSVFLFPPKPKDTLMISRTPEVTC |
| | | VVVDVSHEDPEVKFNWYVDGVEVHNAKTKPREEQYNSTYRVVSV |
| | | LTVLHQDWLNGKEYKCKVSNKALPAPIEKTISKAKGQPREPQVY |
| | | TLPPSREEMTKNQVSLTCLVKGFYPSDIAVEWESNGQPENNYKT |
| | | TPPVLDSDGSFFLYSKLTVDKSRWQQGNVFSCSVMHEALHNHYT |
| | | QKSLSLSPG |
| 582 | Antibody 5.1 IgG1 HC | QVQLVESGGGVVQPGRSLRLSCAASGFTFSSYGMHWVRQAPGKG |
| | (VH: F134T, VL: S34R_ | LEWVAVISYDGSNKYYADSVKGRFTISRDNSKNTLYLQMNSLRA |
| | S57Y_F103V)_huIgG1z | EDTAVYYCARGRYFDWTLFDYWGQGTLVTVSSASTKGPSVFPLA |
| | mAb | PSSKSTSGGTAALGCLVKDYFPEPVTVSWNSGALTSGVHTFPAV |
| | | LQSSGLYSLSSVVTVPSSSLGTQTYICNVNHKPSNTKVDKKVEP |
| | | KSCDKTHTCPPCPAPELLGGPSVFLFPPKPKDTLMISRTPEVTC |
| | | VVVDVSHEDPEVKFNWYVDGVEVHNAKTKPREEQYNSTYRVVSV |
| | | LTVLHQDWLNGKEYKCKVSNKALPAPIEKTISKAKGQPREPQVY |
| | | TLPPSREEMTKNQVSLTCLVKGFYPSDIAVEWESNGQPENNYKT |
| | | TPPVLDSDGSFFLYSKLTVDKSRWQQGNVFSCSVMHEALHNHYT |
| | | QKSLSLSPG |
| 583 | Antibody 5.2 IgG1 HC | QVQLVESGGGVVQPGRSLRLSCAASGFTFSSYPMHWVRQAPGKG |
| | (VH: G40P_F134T, VL: | LEWVAVISYDGSNKYYADSVKGRFTISRDNSKNTLYLQMNSLRA |
| | S57Y_E58L_V67R_F103V)_ | EDTAVYYCARGRYFDWTLFDYWGQGTLVTVSSASTKGPSVFPLA |
| | huIgG1z mAb | PSSKSTSGGTAALGCLVKDYFPEPVTVSWNSGALTSGVHTFPAV |
| | | LQSSGLYSLSSVVTVPSSSLGTQTYICNVNHKPSNTKVDKKVEP |
| | | KSCDKTHTCPPCPAPELLGGPSVFLFPPKPKDTLMISRTPEVTC |
| | | VVVDVSHEDPEVKFNWYVDGVEVHNAKTKPREEQYNSTYRVVSV |
| | | LTVLHQDWLNGKEYKCKVSNKALPAPIEKTISKAKGQPREPQVY |
| | | TLPPSREEMTKNQVSLTCLVKGFYPSDIAVEWESNGQPENNYKT |
| | | TPPVLDSDGSFFLYSKLTVDKSRWQQGNVFSCSVMHEALHNHYT |
| | | QKSLSLSPG |
| 584 | Antibody 5.3 IgG1 HC | QVQLVESGGGVVQPGRSLRLSCAASGFTFSSYGMHWVRQAPGKG |
| | (VH: A71S_D72R, VL: | LEWVAVISYDGSNKYYSRSVKGRFTISRDNSKNTLYLQMNSLRA |
| | S57Y_E58L_V67S_F103V)_ | EDTAVYYCARGRYFDWFLFDYWGQGTLVTVSSASTKGPSVFPLA |
| | huIgG1z mAb | PSSKSTSGGTAALGCLVKDYFPEPVTVSWNSGALTSGVHTFPAV |
| | | LQSSGLYSLSSVVTVPSSSLGTQTYICNVNHKPSNTKVDKKVEP |
| | | KSCDKTHTCPPCPAPELLGGPSVFLFPPKPKDTLMISRTPEVTC |
| | | VVVDVSHEDPEVKFNWYVDGVEVHNAKTKPREEQYNSTYRVVSV |
| | | LTVLHQDWLNGKEYKCKVSNKALPAPIEKTISKAKGQPREPQVY |
| | | TLPPSREEMTKNQVSLTCLVKGFYPSDIAVEWESNGQPENNYKT |
| | | TPPVLDSDGSFFLYSKLTVDKSRWQQGNVFSCSVMHEALHNHYT |
| | | QKSLSLSPG |
| 585 | Antibody 5.4 IgG1 HC | QVQLVESGGGVVQPGRSLRLSCAASGFTFSSYAMHWVRQAPGKG |
| | (VH: G40A, VL: S57Y_ | LEWVAVISYDGSNKYYADSVKGRFTISRDNSKNTLYLQMNSLRA |
| | E58L_V67T_F103V)_ | EDTAVYYCARGRYFDWFLFDYWGQGTLVTVSSASTKGPSVFPLA |
| | huIgGIz mAb | PSSKSTSGGTAALGCLVKDYFPEPVTVSWNSGALTSGVHTFPAV |
| | | LQSSGLYSLSSVVTVPSSSLGTQTYICNVNHKPSNTKVDKKVEP |
| | | KSCDKTHTCPPCPAPELLGGPSVFLFPPKPKDTLMISRTPEVTC |
| | | VVVDVSHEDPEVKFNWYVDGVEVHNAKTKPREEQYNSTYRVVSV |
| | | LTVLHQDWLNGKEYKCKVSNKALPAPIEKTISKAKGQPREPQVY |
| | | TLPPSREEMTKNQVSLTCLVKGFYPSDIAVEWESNGQPENNYKT |
| | | TPPVLDSDGSFFLYSKLTVDKSRWQQGNVFSCSVMHEALHNHYT |
| | | QKSLSLSPG |
| 586 | Antibody 5.5 IgG1 HC | QVQLVESGGGVVQPGRSLRLSCAASGFTFSSYPVHWVRQAPGKG |
| | (VH: G40P_M41V, VL: | LEWVAVISYDGSNKYYADSVKGRFTISRDNSKNTLYLQMNSLRA |
| | S57Y_E58L_V67T_F103V)_ | EDTAVYYCARGRYFDWFLFDYWGQGTLVTVSSASTKGPSVFPLA |
| | huIgG1z mAb | PSSKSTSGGTAALGCLVKDYFPEPVTVSWNSGALTSGVHTFPAV |
| | | LQSSGLYSLSSVVTVPSSSLGTQTYICNVNHKPSNTKVDKKVEP |
| | | KSCDKTHTCPPCPAPELLGGPSVFLFPPKPKDTLMISRTPEVTC |
| | | VVVDVSHEDPEVKFNWYVDGVEVHNAKTKPREEQYNSTYRVVSV |
| | | LTVLHQDWLNGKEYKCKVSNKALPAPIEKTISKAKGQPREPQVY |
| | | TLPPSREEMTKNQVSLTCLVKGFYPSDIAVEWESNGQPENNYKT |
| | | TPPVLDSDGSFFLYSKLTVDKSRWQQGNVFSCSVMHEALHNHYT |
| | | QKSLSLSPG |
| 587 | Antibody 5.6 IgG1 HC | QVQLVESGGGVVQPGRSLRLSCAASGFTFSSYGMHWVRQAPGKG |
| | (VH: F134T, VL: S34R_ | LEWVAVISYDGSNKYYADSVKGRFTISRDNSKNTLYLQMNSLRA |
| | S57Y_F103V)_huIgG1z | EDTAVYYCARGRYFDWTLFDYWGQGTLVTVSSASTKGPSVFPLA |
| | mAb(LC: G37A_K38R_ | PSSKSTSGGTAALGCLVKDYFPEPVTVSWNSGALTSGVHTFPAV |
| | M107L) | LQSSGLYSLSSVVTVPSSSLGTQTYICNVNHKPSNTKVDKKVEP |
| | | KSCDKTHTCPPCPAPELLGGPSVFLFPPKPKDTLMISRTPEVTC |
| | | VVVDVSHEDPEVKFNWYVDGVEVHNAKTKPREEQYNSTYRVVSV |
| | | LTVLHQDWLNGKEYKCKVSNKALPAPIEKTISKAKGQPREPQVY |
| | | TLPPSREEMTKNQVSLTCLVKGFYPSDIAVEWESNGQPENNYKT |
| | | TPPVLDSDGSFFLYSKLTVDKSRWQQGNVFSCSVMHEALHNHYT |
| | | QKSLSLSPG |
| 588 | Antibody 5.7 IgG1 HC | QVQLVESGGGVVQPGRSLRLSCAASGFTFSSYGMHWVRQAPGKG |
| | (VH: A71S_D72R, VL: | LEWVAVISYDGSNKYYSRSVKGRFTISRDNSKNTLYLQMNSLRA |
| | S57Y_E58L_V67S_F103V)_ | EDTAVYYCARGRYFDWFLFDYWGQGTLVTVSSASTKGPSVFPLA |
| | huIgGIz mAb(LC: | PSSKSTSGGTAALGCLVKDYFPEPVTVSWNSGALTSGVHTFPAV |
| | G37A_K38R_M107L) | LQSSGLYSLSSVVTVPSSSLGTQTYICNVNHKPSNTKVDKKVEP |
| | | KSCDKTHTCPPCPAPELLGGPSVFLFPPKPKDTLMISRTPEVTC |
| | | VVVDVSHEDPEVKFNWYVDGVEVHNAKTKPREEQYNSTYRVVSV |
| | | LTVLHQDWLNGKEYKCKVSNKALPAPIEKTISKAKGQPREPQVY |
| | | TLPPSREEMTKNQVSLTCLVKGFYPSDIAVEWESNGQPENNYKT |
| | | TPPVLDSDGSFFLYSKLTVDKSRWQQGNVFSCSVMHEALHNHYT |
| | | QKSLSLSPG |
| 589 | Antibody 5.8 IgG1 HC | QVQLVESGGGVVQPGRSLRLSCAASGFTFSSYPMHWVRQAPGKG |
| | (VH: G40P_F134T, VL: | LEWVAVISYDGSNKYYADSVKGRFTISRDNSKNTLYLQMNSLRA |
| | S57Y_E58L_V67R_F103V)_ | EDTAVYYCARGRYFDWTLFDYWGQGTLVTVSSASTKGPSVFPLA |
| | huIgG1z mAb(LC: | PSSKSTSGGTAALGCLVKDYFPEPVTVSWNSGALTSGVHTFPAV |
| | G37A_K38R_M107L) | LQSSGLYSLSSVVTVPSSSLGTQTYICNVNHKPSNTKVDKKVEP |
| | | KSCDKTHTCPPCPAPELLGGPSVFLFPPKPKDTLMISRTPEVTC |
| | | VVVDVSHEDPEVKFNWYVDGVEVHNAKTKPREEQYNSTYRVVSV |
| | | LTVLHQDWLNGKEYKCKVSNKALPAPIEKTISKAKGQPREPQVY |
| | | TLPPSREEMTKNQVSLTCLVKGFYPSDIAVEWESNGQPENNYKT |
| | | TPPVLDSDGSFFLYSKLTVDKSRWQQGNVFSCSVMHEALHNHYT |
| | | QKSLSLSPG |
| 590 | Antibody 5.9 IgG1 HC | QVQLVESGGGVVQPGRSLRLSCAASGFTFSSYAMHWVRQAPGKG |
| | (VH: G40A, VL: S57Y_ | LEWVAVISYDGSNKYYADSVKGRFTISRDNSKNTLYLQMNSLRA |
| | E58L_V67T_F103V)_ | EDTAVYYCARGRYFDWFLFDYWGQGTLVTVSSASTKGPSVFPLA |
| | huIgGIz mAb(LC: | PSSKSTSGGTAALGCLVKDYFPEPVTVSWNSGALTSGVHTFPAV |
| | G37A_K38R_M107L) | LQSSGLYSLSSVVTVPSSSLGTQTYICNVNHKPSNTKVDKKVEP |
| | | KSCDKTHTCPPCPAPELLGGPSVFLFPPKPKDTLMISRTPEVTC |
| | | VVVDVSHEDPEVKFNWYVDGVEVHNAKTKPREEQYNSTYRVVSV |
| | | LTVLHQDWLNGKEYKCKVSNKALPAPIEKTISKAKGQPREPQVY |
| | | TLPPSREEMTKNQVSLTCLVKGFYPSDIAVEWESNGQPENNYKT |
| | | TPPVLDSDGSFFLYSKLTVDKSRWQQGNVFSCSVMHEALHNHYT |
| | | QKSLSLSPG |
| 591 | Antibody 6.0 IgG1 HC | QVQLVESGGGVVQPGRSLRLSCEASGFTFSSYVMHWVRQAPGKG |
| | | LEWVSVISYDGSSQYYTDSVKGRFTISRDNSKNTLNLQMNSLRA |
| | | EDTAVYYCVRGRLATAILFDYWGQGTLVTVSSASTKGPSVFPLA |
| | | PSSKSTSGGTAALGCLVKDYFPEPVTVSWNSGALTSGVHTFPAV |
| | | LQSSGLYSLSSVVTVPSSSLGTQTYICNVNHKPSNTKVDKKVEP |
| | | KSCDKTHTCPPCPAPELLGGPSVFLFPPKPKDTLMISRTPEVTC |
| | | VVVDVSHEDPEVKFNWYVDGVEVHNAKTKPREEQYNSTYRVVSV |
| | | LTVLHQDWLNGKEYKCKVSNKALPAPIEKTISKAKGQPREPQVY |
| | | TLPPSREEMTKNQVSLTCLVKGFYPSDIAVEWESNGQPENNYKT |
| | | TPPVLDSDGSFFLYSKLTVDKSRWQQGNVFSCSVMHEALHNHYT |
| | | QKSLSLSPG |
| 592 | Antibody 6.1 IgG1 HC | QVQLVESGGGVVQPGRSLRLSCEASGFTFSSYVMHWVRQAPGKG |
| | (VH: S67R_A114S_I13 | LEWVSVISYDGSRQYYTDSVKGRFTISRDNSKNTLNLQMNSLRA |
| | 4P, VL: F71L)_huIgG1z | EDTAVYYCVRGRLATSPLFDYWGQGTLVTVSSASTKGPSVFPLA |
| | mAb | PSSKSTSGGTAALGCLVKDYFPEPVTVSWNSGALTSGVHTFPAV |
| | | LQSSGLYSLSSVVTVPSSSLGTQTYICNVNHKPSNTKVDKKVEP |
| | | KSCDKTHTCPPCPAPELLGGPSVFLFPPKPKDTLMISRTPEVTC |
| | | VVVDVSHEDPEVKFNWYVDGVEVHNAKTKPREEQYNSTYRVVSV |
| | | LTVLHQDWLNGKEYKCKVSNKALPAPIEKTISKAKGQPREPQVY |
| | | TLPPSREEMTKNQVSLTCLVKGFYPSDIAVEWESNGQPENNYKT |
| | | TPPVLDSDGSFFLYSKLTVDKSRWQQGNVFSCSVMHEALHNHYT |
| | | QKSLSLSPG |
| 593 | Antibody 6.2 IgG1 HC | QVQLVESGGGVVQPGRSLRLSCEASGFTFSSYVMHWVRQAPGKG |
| | (VH: S67R_Q68A_L135K_ | LEWVSVISYDGSRAYYTDSVKGRFTISRDNSKNTLNLQMNSLRA |
| | F136L, VL: S109T_ | EDTAVYYCVRGRLATAIKLDYWGQGTLVTVSSASTKGPSVFPLA |
| | I110L)_huIgG1z mAb | PSSKSTSGGTAALGCLVKDYFPEPVTVSWNSGALTSGVHTFPAV |
| | | LQSSGLYSLSSVVTVPSSSLGTQTYICNVNHKPSNTKVDKKVEP |
| | | KSCDKTHTCPPCPAPELLGGPSVFLFPPKPKDTLMISRTPEVTC |
| | | VVVDVSHEDPEVKFNWYVDGVEVHNAKTKPREEQYNSTYRVVSV |
| | | LTVLHQDWLNGKEYKCKVSNKALPAPIEKTISKAKGQPREPQVY |
| | | TLPPSREEMTKNQVSLTCLVKGFYPSDIAVEWESNGQPENNYKT |
| | | TPPVLDSDGSFFLYSKLTVDKSRWQQGNVFSCSVMHEALHNHYT |
| | | QKSLSLSPG |

TABLE 18
Exemplary nucleic acid sequences that encode antibodies of the present invention.

| SEQ ID NO: | Designation | Sequence |
|---|---|---|
| 594 | Antibody 1 IgG1 HC DNA | GAGGTGCAGCTGGTGGAGTCTGGGGGAGGCTTGGTAAAGCCTGG |
| | | GGGGTCCCTGAGACTCTCCTGTGCAGCCTCTGGATTTACTTTCA |
| | | GTAACGCCCGGATGGGCTGGGTCCGCCAGGCTCCAGGGAAGGGG |
| | | CTGGAGTGGGTTGGCCGTATTAAAAGCAAAACTGAAGGTGGGAC |
| | | AAGAGACTACGCTGCACCCGTGAAAGGCAGATTCACCATCTCAA |
| | | GAGATGATTCAAAAAACACGCTGTATCTGCAAATGAACAGCCTG |
| | | AAAACCGAGGACACAGCCGTGTATTATTGTACCTCGTATAGTGG |
| | | GGTCTGGGGCCAAGGGACAATGGTCACCGTCTCTTCAGCCTCCA |
| | | CCAAGGGCCCATCGGTCTTCCCCCTGGCACCCTCCTCCAAGAGC |
| | | ACCTCTGGGGGCACAGCGGCCCTGGGCTGCCTGGTCAAGGACTA |
| | | CTTCCCCGAACCGGTGACGGTGTCGTGGAACTCAGGCGCCCTGA |
| | | CCAGCGGCGTGCACACCTTCCCGGCTGTCCTACAGTCCTCAGGA |
| | | CTCTACTCCCTCAGCAGCGTGGTGACCGTGCCCTCCAGCAGCTT |
| | | GGGCACCCAGACCTACATCTGCAACGTGAATCACAAGCCCAGCA |
| | | ACACCAAGGTGGACAAGAAAGTTGAGCCCAAATCTTGTGACAAA |
| | | ACTCACACATGCCCACCGTGCCCAGCACCTGAACTCCTGGGGGG |
| | | ACCGTCAGTCTTCCTCTTCCCCCCAAAACCCAAGGACACCCTCA |
| | | TGATCTCCCGGACCCCTGAGGTCACATGCGTGGTGGTGGACGTG |
| | | AGCCACGAAGACCCTGAGGTCAAGTTCAACTGGTACGTGGACGG |
| | | CGTGGAGGTGCATAATGCCAAGACAAAGCCGCGGGAGGAGCAGT |
| | | ACAACAGCACGTACCGTGTGGTCAGCGTCCTCACCGTCCTGCAC |
| | | CAGGACTGGCTGAATGGCAAGGAGTACAAGTGCAAGGTGTCCAA |
| | | CAAAGCCCTCCCAGCCCCCATCGAGAAAACCATCTCCAAAGCCA |
| | | AAGGGCAGCCCCGAGAACCACAGGTGTACACCCTGCCCCCATCC |
| | | CGGGAGGAGATGACCAAGAACCAGGTCAGCCTGACCTGCCTGGT |
| | | CAAAGGCTTCTATCCCAGCGACATCGCCGTGGAGTGGGAGAGCA |
| | | ATGGGCAGCCGGAGAACAACTACAAGACCACGCCTCCCGTGCTG |
| | | GACTCCGACGGCTCCTTCTTCCTCTATAGCAAGCTCACCGTGGA |
| | | CAAGAGCAGGTGGCAGCAGGGGAACGTCTTCTCATGCTCCGTGA |
| | | TGCATGAGGCTCTGCACAACCACTACACGCAGAAGAGCCTCTCC |
| | | CTGTCTCCGGGCAAATAG |
| 595 | Antibody 1 IgG1 LC DNA | GACATCGTGATGACCCAGTCTCCAGACTCCCTGGCTGTGTCTCT |
| | | GGGCGAGAGGGCCACCATCAACTGCAAGTCCAGCCAGAGTGTTT |
| | | TATACAGTTCCAACAATAAGAACTACTTAGCTTGGTACCATCAG |
| | | AAACCAGGACAGTCTCCTAAGCTGCTCATTTCCTGGGCATCTAC |
| | | CCGGGAATCCGGGGTCCCTGACCGATTCAGTGGCAGCGGGTCTG |
| | | GGACAGATTTCACTCTCACCATCAACAGCCTGCAGGCTGAAGAT |
| | | GTGGCAGTTTATTACTGTCAACAATATTATAGTATTCCGATCAC |
| | | TTTCGGCGGAGGGACCAAGGTGGAGATCAAACGAACGGTGGCTG |
| | | CACCATCTGTCTTCATCTTCCCGCCATCTGATGAGCAGTTGAAA |
| | | TCTGGAACTGCCTCTGTTGTGTGCCTGCTGAATAACTTCTATCC |
| | | CAGAGAGGCCAAAGTACAGTGGAAGGTGGATAACGCCCTCCAAT |
| | | CGGGTAACTCCCAGGAGAGTGTCACAGAGCAGGACAGCAAGGAC |
| | | AGCACCTACAGCCTCAGCAGCACCCTGACGCTGAGCAAAGCAGA |
| | | CTACGAGAAACACAAAGTCTACGCCTGCGAAGTCACCCATCAGG |
| | | GCCTGAGCTCGCCCGTCACAAAGAGCTTCAACAGGGGAGAGTGT |
| | | TAG |
| 596 | Antibody 1.1 IgG1 (LC: H45Q_S51P) | GAGGTGCAGCTGGTGGAGTCTGGGGGAGGCTTGGTAAAGCCTGG |
| | HC DNA | GGGGTCCCTGAGACTCTCCTGTGCAGCCTCTGGATTTACTTTCA |
| | | GTAACGCCCGGATGGGCTGGGTCCGCCAGGCTCCAGGGAAGGGG |
| | | CTGGAGTGGGTTGGCCGTATTAAAAGCAAAACTGAAGGTGGGAC |
| | | AAGAGACTACGCTGCACCCGTGAAAGGCAGATTCACCATCTCAA |
| | | GAGATGATTCAAAAAACACGCTGTATCTGCAAATGAACAGCCTG |
| | | AAAACCGAGGACACAGCCGTGTATTATTGTACCTCGTATAGTGG |
| | | GGTCTGGGGCCAAGGGACAATGGTCACCGTCTCTTCAGCCTCCA |
| | | CCAAGGGCCCATCGGTCTTCCCCCTGGCACCCTCCTCCAAGAGC |
| | | ACCTCTGGGGGCACAGCGGCCCTGGGCTGCCTGGTCAAGGACTA |
| | | CTTCCCCGAACCGGTGACGGTGTCGTGGAACTCAGGCGCCCTGA |
| | | CCAGCGGCGTGCACACCTTCCCGGCTGTCCTACAGTCCTCAGGA |
| | | CTCTACTCCCTCAGCAGCGTGGTGACCGTGCCCTCCAGCAGCTT |
| | | GGGCACCCAGACCTACATCTGCAACGTGAATCACAAGCCCAGCA |
| | | ACACCAAGGTGGACAAGAAAGTTGAGCCCAAATCTTGTGACAAA |
| | | ACTCACACATGCCCACCGTGCCCAGCACCTGAACTCCTGGGGGG |
| | | ACCGTCAGTCTTCCTCTTCCCCCCAAAACCCAAGGACACCCTCA |
| | | TGATCTCCCGGACCCCTGAGGTCACATGCGTGGTGGTGGACGTG |
| | | AGCCACGAAGACCCTGAGGTCAAGTTCAACTGGTACGTGGACGG |
| | | CGTGGAGGTGCATAATGCCAAGACAAAGCCGCGGGAGGAGCAGT |
| | | ACAACAGCACGTACCGTGTGGTCAGCGTCCTCACCGTCCTGCAC |
| | | CAGGACTGGCTGAATGGCAAGGAGTACAAGTGCAAGGTGTCCAA |
| | | CAAAGCCCTCCCAGCCCCCATCGAGAAAACCATCTCCAAAGCCA |
| | | AAGGGCAGCCCCGAGAACCACAGGTGTACACCCTGCCCCCATCC |
| | | CGGGAGGAGATGACCAAGAACCAGGTCAGCCTGACCTGCCTGGT |
| | | CAAAGGCTTCTATCCCAGCGACATCGCCGTGGAGTGGGAGAGCA |
| | | ATGGGCAGCCGGAGAACAACTACAAGACCACGCCTCCCGTGCTG |
| | | GACTCCGACGGCTCCTTCTTCCTCTATAGCAAGCTCACCGTGGA |
| | | CAAGAGCAGGTGGCAGCAGGGGAACGTCTTCTCATGCTCCGTGA |
| | | TGCATGAGGCTCTGCACAACCACTACACGCAGAAGAGCCTCTCC |
| | | CTGTCTCCGGGCAAATAG |
| 597 | Antibody 1.1 IgG1 (LC: H45Q_S51P) | GACATCGTGATGACCCAGTCTCCAGACTCCCTGGCTGTGTCTCT |
| | LC DNA | GGGCGAGAGGGCCACCATCAACTGCAAGTCCAGCCAGAGTGTTT |
| | | TATACAGTTCCAACAATAAGAACTACTTAGCTTGGTACCAGCAG |
| | | AAACCAGGACAGCCCCCTAAGCTGCTCATTTCCTGGGCATCTAC |
| | | CCGGGAATCCGGGGTCCCTGACCGATTCAGTGGCAGCGGGTCTG |
| | | GGACAGATTTCACTCTCACCATCAACAGCCTGCAGGCTGAAGAT |
| | | GTGGCAGTTTATTACTGTCAACAATATTATAGTATTCCGATCAC |
| | | TTTCGGCGGAGGGACCAAGGTGGAGATCAAACGAACGGTGGCTG |
| | | CACCATCTGTCTTCATCTTCCCGCCATCTGATGAGCAGTTGAAA |
| | | TCTGGAACTGCCTCTGTTGTGTGCCTGCTGAATAACTTCTATCC |
| | | CAGAGAGGCCAAAGTACAGTGGAAGGTGGATAACGCCCTCCAAT |
| | | CGGGTAACTCCCAGGAGAGTGTCACAGAGCAGGACAGCAAGGAC |
| | | AGCACCTACAGCCTCAGCAGCACCCTGACGCTGAGCAAAGCAGA |
| | | CTACGAGAAACACAAAGTCTACGCCTGCGAAGTCACCCATCAGG |
| | | GCCTGAGCTCGCCCGTCACAAAGAGCTTCAACAGGGGAGAGTGT |
| | | TAG |
| 598 | Antibody 2.1 IgG1 HC | CAGGTGCAGTTGGTGGAGTCTGGGGGAGGCGTGGTCCAGCCTGG |
| | (LC: F2I_P51S_H53Q_L103V_N148K, | GAGGTCCCTGAGACTCTCCTGTGCAGCCTCTGGATTCACCTTCA |
| | HC: K87N_S94N_V98A)(LC: Y25A_ | GTAACTATGGCATGCACTGGGTCCGCCAGGCTCCAGGCAAGGGG |
| | S26A, HC: A71I_D72R) DNA | CTGGAGTGGGTGGCAGTCATATCATATGATGGAAGTAATAAATT |
| | | CTATATCAGATCCGTGAAGGGCCGATTCACCATCTCCAGAGACA |
| | | ATTCCAAGAACACTCTGTATCTTCAAATGAACAGCCTGAGAGCC |
| | | GAGGACACGGCTGTATATTATTGTGCGAGAGCCGGGGGTATAGG |
| | | GCGTTTTGACTACTGGGGCCAGGGAACCCTGGTCACCGTCTCCT |
| | | CAGCCTCCACCAAGGGCCCATCGGTCTTCCCCCTGGCACCCTCC |
| | | TCCAAGAGCACCTCTGGGGGCACAGCGGCCCTGGGCTGCCTGGT |
| | | CAAGGACTACTTCCCCGAACCGGTGACGGTGTCGTGGAACTCAG |
| | | GCGCCCTGACCAGCGGCGTGCACACCTTCCCGGCTGTCCTACAG |
| | | TCCTCAGGACTCTACTCCCTCAGCAGCGTGGTGACCGTGCCCTC |
| | | CAGCAGCTTGGGCACCCAGACCTACATCTGCAACGTGAATCACA |
| | | AGCCCAGCAACACCAAGGTGGACAAGAAAGTTGAGCCCAAATCT |
| | | TGTGACAAAACTCACACATGCCCACCGTGCCCAGCACCTGAACT |
| | | CCTGGGGGGACCGTCAGTCTTCCTCTTCCCCCCAAAACCCAAGG |
| | | ACACCCTCATGATCTCCCGGACCCCTGAGGTCACATGCGTGGTG |
| | | GTGGACGTGAGCCACGAAGACCCTGAGGTCAAGTTCAACTGGTA |
| | | CGTGGACGGCGTGGAGGTGCATAATGCCAAGACAAAGCCGCGGG |
| | | AGGAGCAGTACAACAGCACGTACCGTGTGGTCAGCGTCCTCACC |
| | | GTCCTGCACCAGGACTGGCTGAATGGCAAGGAGTACAAGTGCAA |
| | | GGTGTCCAACAAAGCCCTCCCAGCCCCCATCGAGAAAACCATCT |
| | | CCAAAGCCAAAGGGCAGCCCCGAGAACCACAGGTGTACACCCTG |
| | | CCCCCATCCCGGGAGGAGATGACCAAGAACCAGGTCAGCCTGAC |
| | | CTGCCTGGTCAAAGGCTTCTATCCCAGCGACATCGCCGTGGAGT |
| | | GGGAGAGCAATGGGCAGCCGGAGAACAACTACAAGACCACGCCT |
| | | CCCGTGCTGGACTCCGACGGCTCCTTCTTCCTCTATAGCAAGCT |
| | | CACCGTGGACAAGAGCAGGTGGCAGCAGGGGAACGTCTTCTCAT |
| | | GCTCCGTGATGCATGAGGCTCTGCACAACCACTACACGCAGAAG |
| | | AGCCTCTCCCTGTCTCCGGGCAAATAG |
| 599 | Antibody 2.1 IgG1 LC | GATATCGTAATGACCCAGACTCCACTCTCTCTGTCCGTCACCCC |
| | (LC: F2I_P51S_H53Q_L103V_N148K, | TGGACAGCCGGCCTCCATCTCCTGCAAGGCCGCCCAGAGCCTCC |
| | HC: K87N_S94N_V98A)(LC: Y25A_ | TGCACAGTGATGGAAAGACCTATTTGTTTTGGTACCTGCAGAAG |
| | S26A, HC: A71I_D72R) DNA | CCAGGCCAGAGCCCACAGCTCCTGATCTATGAAGTTTCCAACCG |
| | | GTTCTCTGGAGTGCCAGATAGGTTCAGTGGCAGCGGGTCAGGGA |
| | | CAGATTTCACACTGAAGATCAGCCGGGTGGAGGCTGAGGATGTT |
| | | GGGGTGTATTACTGCATGCAAACTTTAAAGCTTCCGCTCACTTT |
| | | CGGCGGAGGGACCAAGGTGGAGATCAAGCGAACGGTGGCTGCAC |
| | | CATCTGTCTTCATCTTCCCGCCATCTGATGAGCAGTTGAAATCT |
| | | GGAACTGCCTCTGTTGTGTGCCTGCTGAATAACTTCTATCCCAG |
| | | AGAGGCCAAAGTACAGTGGAAGGTGGATAACGCCCTCCAATCGG |
| | | GTAACTCCCAGGAGAGTGTCACAGAGCAGGACAGCAAGGACAGC |
| | | ACCTACAGCCTCAGCAGCACCCTGACGCTGAGCAAAGCAGACTA |
| | | CGAGAAACACAAAGTCTACGCCTGCGAAGTCACCCATCAGGGCC |
| | | TGAGCTCGCCCGTCACAAAGAGCTTCAACAGGGGAGAGTGTTAG |
| 600 | Antibody 2.2 IgG1 HC | CAGGTGCAGTTGGTGGAGTCTGGGGGAGGCGTGGTCCAGCCTGG |
| | (LC: F2I_P51S_H53Q_L103V_N148K, | GAGGTCCCTGAGACTCTCCTGTGCAGCCTCTGGATTCACCTTCA |
| | HC: K87N_S94N_V98A)(LC: Y25A, | GTAACTATGGCATGCACTGGGTCCGCCAGGCTCCAGGCAAGGGG |
| | HC: A71L_D72K) DNA | CTGGAGTGGGTGGCAGTCATATCATATGATGGAAGTAATAAATT |
| | | CTATCTGAAGTCCGTGAAGGGCCGATTCACCATCTCCAGAGACA |
| | | ATTCCAAGAACACTCTGTATCTTCAAATGAACAGCCTGAGAGCC |
| | | GAGGACACGGCTGTATATTATTGTGCGAGAGCCGGGGGTATAGG |
| | | GCGTTTTGACTACTGGGGCCAGGGAACCCTGGTCACCGTCTCCT |
| | | CAGCCTCCACCAAGGGCCCATCGGTCTTCCCCCTGGCACCCTCC |
| | | TCCAAGAGCACCTCTGGGGGCACAGCGGCCCTGGGCTGCCTGGT |
| | | CAAGGACTACTTCCCCGAACCGGTGACGGTGTCGTGGAACTCAG |
| | | GCGCCCTGACCAGCGGCGTGCACACCTTCCCGGCTGTCCTACAG |
| | | TCCTCAGGACTCTACTCCCTCAGCAGCGTGGTGACCGTGCCCTC |
| | | CAGCAGCTTGGGCACCCAGACCTACATCTGCAACGTGAATCACA |
| | | AGCCCAGCAACACCAAGGTGGACAAGAAAGTTGAGCCCAAATCT |
| | | TGTGACAAAACTCACACATGCCCACCGTGCCCAGCACCTGAACT |
| | | CCTGGGGGGACCGTCAGTCTTCCTCTTCCCCCCAAAACCCAAGG |
| | | ACACCCTCATGATCTCCCGGACCCCTGAGGTCACATGCGTGGTG |
| | | GTGGACGTGAGCCACGAAGACCCTGAGGTCAAGTTCAACTGGTA |
| | | CGTGGACGGCGTGGAGGTGCATAATGCCAAGACAAAGCCGCGGG |
| | | AGGAGCAGTACAACAGCACGTACCGTGTGGTCAGCGTCCTCACC |
| | | GTCCTGCACCAGGACTGGCTGAATGGCAAGGAGTACAAGTGCAA |
| | | GGTGTCCAACAAAGCCCTCCCAGCCCCCATCGAGAAAACCATCT |
| | | CCAAAGCCAAAGGGCAGCCCCGAGAACCACAGGTGTACACCCTG |
| | | CCCCCATCCCGGGAGGAGATGACCAAGAACCAGGTCAGCCTGAC |
| | | CTGCCTGGTCAAAGGCTTCTATCCCAGCGACATCGCCGTGGAGT |
| | | GGGAGAGCAATGGGCAGCCGGAGAACAACTACAAGACCACGCCT |
| | | CCCGTGCTGGACTCCGACGGCTCCTTCTTCCTCTATAGCAAGCT |
| | | CACCGTGGACAAGAGCAGGTGGCAGCAGGGGAACGTCTTCTCAT |
| | | GCTCCGTGATGCATGAGGCTCTGCACAACCACTACACGCAGAAG |
| | | AGCCTCTCCCTGTCTCCGGGCAAATAG |
| 601 | Antibody 2.2 IgG1 LC | GATATCGTAATGACCCAGACTCCACTCTCTCTGTCCGTCACCCC |
| | (LC: F2I_P51S_H53Q_L103V_N148K, | TGGACAGCCGGCCTCCATCTCCTGCAAGGCCAGTCAGAGCCTCC |
| | HC: K87N_S94N_V98A)(LC: Y25A, | TGCACAGTGATGGAAAGACCTATTTGTTTTGGTACCTGCAGAAG |
| | HC: A71L_D72K) DNA | CCAGGCCAGAGCCCACAGCTCCTGATCTATGAAGTTTCCAACCG |
| | | GTTCTCTGGAGTGCCAGATAGGTTCAGTGGCAGCGGGTCAGGGA |
| | | CAGATTTCACACTGAAGATCAGCCGGGTGGAGGCTGAGGATGTT |
| | | GGGGTGTATTACTGCATGCAAACTTTAAAGCTTCCGCTCACTTT |
| | | CGGCGGAGGGACCAAGGTGGAGATCAAGCGAACGGTGGCTGCAC |
| | | CATCTGTCTTCATCTTCCCGCCATCTGATGAGCAGTTGAAATCT |
| | | GGAACTGCCTCTGTTGTGTGCCTGCTGAATAACTTCTATCCCAG |
| | | AGAGGCCAAAGTACAGTGGAAGGTGGATAACGCCCTCCAATCGG |
| | | GTAACTCCCAGGAGAGTGTCACAGAGCAGGACAGCAAGGACAGC |
| | | ACCTACAGCCTCAGCAGCACCCTGACGCTGAGCAAAGCAGACTA |
| | | CGAGAAACACAAAGTCTACGCCTGCGAAGTCACCCATCAGGGCC |
| | | TGAGCTCGCCCGTCACAAAGAGCTTCAACAGGGGAGAGTGTTAG |
| 602 | Antibody 3.0 IgG1 HC DNA | GAGGTGCAGCTGGTGGAGTCTGGGGGAGGCTTGGTAAAGCCTGG |
| | | GGGGTCCCTTAGACTCTCCTGTGCAGCCTCTGGATTCATTTTTA |
| | | GTAATGCCTGGATGAGCTGGGTCCGCCAGGCTCCAGGGAAGGGG |
| | | CTGGAGTGGGTTGCCCGTATTAAAAGGAGAACTGATGGTGGGAC |
| | | AACTGACTACGCTGCACCCGTGAAAGACAGATTCACCATCTCAA |
| | | GAGATGATTCAAAAAACACGCTGTTTCTGCAAATGAACAGCCTG |
| | | AAAACCGAGGACACAGCCGTGTATTACTGTACCACAGTTACTAT |
| | | GGTTCGGGGAGTTATTGCTGATTACTGGGGCCAGGGAACCCTGG |
| | | TCACCGTCTCCTCAGCCTCCACCAAGGGCCCATCGGTCTTCCCC |
| | | CTGGCACCCTCCTCCAAGAGCACCTCTGGGGGCACAGCGGCCCT |
| | | GGGCTGCCTGGTCAAGGACTACTTCCCCGAACCGGTGACGGTGT |
| | | CGTGGAACTCAGGCGCCCTGACCAGCGGCGTGCACACCTTCCCG |
| | | GCTGTCCTACAGTCCTCAGGACTCTACTCCCTCAGCAGCGTGGT |
| | | GACCGTGCCCTCCAGCAGCTTGGGCACCCAGACCTACATCTGCA |
| | | ACGTGAATCACAAGCCCAGCAACACCAAGGTGGACAAGAAAGTT |
| | | GAGCCCAAATCTTGTGACAAAACTCACACATGCCCACCGTGCCC |
| | | AGCACCTGAACTCCTGGGGGGACCGTCAGTCTTCCTCTTCCCCC |
| | | CAAAACCCAAGGACACCCTCATGATCTCCCGGACCCCTGAGGTC |
| | | ACATGCGTGGTGGTGGACGTGAGCCACGAAGACCCTGAGGTCAA |
| | | GTTCAACTGGTACGTGGACGGCGTGGAGGTGCATAATGCCAAGA |
| | | CAAAGCCGCGGGAGGAGCAGTACAACAGCACGTACCGTGTGGTC |
| | | AGCGTCCTCACCGTCCTGCACCAGGACTGGCTGAATGGCAAGGA |
| | | GTACAAGTGCAAGGTGTCCAACAAAGCCCTCCCAGCCCCCATCG |
| | | AGAAAACCATCTCCAAAGCCAAAGGGCAGCCCCGAGAACCACAG |
| | | GTGTACACCCTGCCCCCATCCCGGGAGGAGATGACCAAGAACCA |
| | | GGTCAGCCTGACCTGCCTGGTCAAAGGCTTCTATCCCAGCGACA |
| | | TCGCCGTGGAGTGGGAGAGCAATGGGCAGCCGGAGAACAACTAC |
| | | AAGACCACGCCTCCCGTGCTGGACTCCGACGGCTCCTTCTTCCT |
| | | CTATAGCAAGCTCACCGTGGACAAGAGCAGGTGGCAGCAGGGGA |
| | | ACGTCTTCTCATGCTCCGTGATGCATGAGGCTCTGCACAACCAC |
| | | TACACGCAGAAGAGCCTCTCCCTGTCTCCGGGCAAATAG |
| 603 | Antibody 3.0 IgG1 LC DNA | GAAATTGTGTTGACGCAGTCTCCAGGCACCCTGTCTTTGTCTCC |
| | | AGGGGAAAGAGCCACCCTCTCCTGCAGGGCCAGTCAGAGTGTTA |
| | | GCAGCGGCTCCTTAGCCTGGTACCAGCAGAAACTTGGCCAGGCT |
| | | CCCAGGCTCCTCATCTATGGTGCATCCAGCAGGGCCACTGGCAT |
| | | CCCAGACAGGTTCAGTGGCAGTGGGTCTGGGACAGACTTCACTC |
| | | TCACCATCAGCAGCCTGGAGCCTGAAGATTTTGCAGTGTATTAC |
| | | TGTCAACAGTATGGTAGCTCACGGACGTTCGGCCAAGGGACCAA |
| | | GGTGGAGCTCAAACGAACGGTGGCTGCACCATCTGTCTTCATCT |
| | | TCCCGCCATCTGATGAGCAGTTGAAATCTGGAACTGCCTCTGTT |
| | | GTGTGCCTGCTGAATAACTTCTATCCCAGAGAGGCCAAAGTACA |
| | | GTGGAAGGTGGATAACGCCCTCCAATCGGGTAACTCCCAGGAGA |
| | | GTGTCACAGAGCAGGACAGCAAGGACAGCACCTACAGCCTCAGC |
| | | AGCACCCTGACGCTGAGCAAAGCAGACTACGAGAAACACAAAGT |
| | | CTACGCCTGCGAAGTCACCCATCAGGGCCTGAGCTCGCCCGTCA |
| | | CAAAGAGCTTCAACAGGGGAGAGTGTTAG |
| 604 | Antibody 4.0 IgG1 HC DNA | GAGGTGCAGCTGGTGGAGTCTGGGGGAGGCTTGGTAAAGCCTGG |
| | | GGGGTCCCTTAGACTCTCCTGTGCAGCCTCTGGATTCATTTTCA |
| | | GTAACGCCTGGATGAGCTGGGTCCGCCAGGCTCCAGGGAAGGGG |
| | | CTGGAGTGGGTTGGCCGTATAAAAAGGAAAACTGATGGTGGTAC |
| | | AACAGACTACGCTGCACCCGTGAAAGGCAGATTCACCATCTCAA |
| | | GAGATGATTCAAAAAACACGTTGTATCTGCTAATGAACAGCCTG |
| | | AAAATCGAGGACACAGCCGTGTATTATTGTACCGTCGTAACTTT |
| | | GGTTCGGGGAATTATCTTTGACTACTGGGGCCAGGGAACCCTGG |
| | | TCACCGTCTCCTCAGCCTCCACCAAGGGCCCATCGGTCTTCCCC |
| | | CTGGCACCCTCCTCCAAGAGCACCTCTGGGGGCACAGCGGCCCT |
| | | GGGCTGCCTGGTCAAGGACTACTTCCCCGAACCGGTGACGGTGT |
| | | CGTGGAACTCAGGCGCCCTGACCAGCGGCGTGCACACCTTCCCG |
| | | GCTGTCCTACAGTCCTCAGGACTCTACTCCCTCAGCAGCGTGGT |
| | | GACCGTGCCCTCCAGCAGCTTGGGCACCCAGACCTACATCTGCA |
| | | ACGTGAATCACAAGCCCAGCAACACCAAGGTGGACAAGAAAGTT |
| | | GAGCCCAAATCTTGTGACAAAACTCACACATGCCCACCGTGCCC |
| | | AGCACCTGAACTCCTGGGGGGACCGTCAGTCTTCCTCTTCCCCC |
| | | CAAAACCCAAGGACACCCTCATGATCTCCCGGACCCCTGAGGTC |
| | | ACATGCGTGGTGGTGGACGTGAGCCACGAAGACCCTGAGGTCAA |
| | | GTTCAACTGGTACGTGGACGGCGTGGAGGTGCATAATGCCAAGA |
| | | CAAAGCCGCGGGAGGAGCAGTACAACAGCACGTACCGTGTGGTC |
| | | AGCGTCCTCACCGTCCTGCACCAGGACTGGCTGAATGGCAAGGA |
| | | GTACAAGTGCAAGGTGTCCAACAAAGCCCTCCCAGCCCCCATCG |
| | | AGAAAACCATCTCCAAAGCCAAAGGGCAGCCCCGAGAACCACAG |
| | | GTGTACACCCTGCCCCCATCCCGGGAGGAGATGACCAAGAACCA |
| | | GGTCAGCCTGACCTGCCTGGTCAAAGGCTTCTATCCCAGCGACA |
| | | TCGCCGTGGAGTGGGAGAGCAATGGGCAGCCGGAGAACAACTAC |
| | | AAGACCACGCCTCCCGTGCTGGACTCCGACGGCTCCTTCTTCCT |
| | | CTATAGCAAGCTCACCGTGGACAAGAGCAGGTGGCAGCAGGGGA |
| | | ACGTCTTCTCATGCTCCGTGATGCATGAGGCTCTGCACAACCAC |
| | | TACACGCAGAAGAGCCTCTCCCTGTCTCCGGGCAAATAG |
| 605 | Antibody 4.0 IgG1 LC DNA | GAAATTGTGTTGACGCAGTCTCCGGGCACCCTGTCTTTGTCTCC |
| | | AGGGGAAAGCGCCACCCTCTCCTGTAGGGTCAGTCAGAGTGTCA |
| | | GCAGCAGCCAGTTAGCCTGGTACCAGCAGAAACCTGGCCAGGCT |
| | | CCCAGGCTCCTCATCTATGGTGCATCCAGCAGGGCCACTGGCAT |
| | | CCCAGACAGGTTCAGTGGCAGTGGGTCTGGGACAGACTTCACTC |
| | | TCACCATCAGCAGACTGGAGCCTGAAGATTTTGCAGTGTATTAC |
| | | TGTCAGCAGTATGGTAACTCACGGACGTTCGGCCAAGGGACCAA |
| | | GGTGGAAATCAAACGAACGGTGGCTGCACCATCTGTCTTCATCT |
| | | TCCCGCCATCTGATGAGCAGTTGAAATCTGGAACTGCCTCTGTT |
| | | GTGTGCCTGCTGAATAACTTCTATCCCAGAGAGGCCAAAGTACA |
| | | GTGGAAGGTGGATAACGCCCTCCAATCGGGTAACTCCCAGGAGA |
| | | GTGTCACAGAGCAGGACAGCAAGGACAGCACCTACAGCCTCAGC |
| | | AGCACCCTGACGCTGAGCAAAGCAGACTACGAGAAACACAAAGT |
| | | CTACGCCTGCGAAGTCACCCATCAGGGCCTGAGCTCGCCCGTCA |
| | | CAAAGAGCTTCAACAGGGGAGAGTGTTAG |
| 606 | Antibody 4.1 IgG1 HC | GAGGTGCAGCTGGTGGAGTCTGGGGGAGGCTTGGTAAAGCCTGG |
| | (VH: M41L_S42Q_L111R_V112S, VL: | GGGGTCCCTTAGACTCTCCTGTGCAGCCTCTGGATTCATTTTCA |
| | S18R_S136P)_huIgG1z | GTAACGCCTGGCTGCAGTGGGTCCGCCAGGCTCCAGGGAAGGGG |
| | mAb(LC: R18S, HC: G65Q_G66L) | CTGGAGTGGGTTGGCCGTATCAAAAGGAAAACTGATCAGCTGAC |
| | DNA | AACAGACTACGCTGCACCCGTGAAAGGCAGATTCACCATCTCAA |
| | | GAGATGATTCAAAAAACACGTTGTATCTGCTAATGAACAGCCTG |
| | | AAAATCGAGGACACAGCCGTGTATTATTGTACCGTCGTAACTAG |
| | | AAGCCGGGGAATTATCTTTGACTACTGGGGCCAGGGAACCCTGG |
| | | TCACCGTGTCCTCAGCCTCCACCAAGGGCCCATCGGTCTTCCCC |
| | | CTGGCACCCTCCTCCAAGAGCACCTCTGGGGGCACAGCGGCCCT |
| | | GGGCTGCCTGGTCAAGGACTACTTCCCCGAACCGGTGACGGTGT |
| | | CGTGGAACTCAGGCGCCCTGACCAGCGGCGTGCACACCTTCCCG |
| | | GCTGTCCTACAGTCCTCAGGACTCTACTCCCTCAGCAGCGTGGT |
| | | GACCGTGCCCTCCAGCAGCTTGGGCACCCAGACCTACATCTGCA |
| | | ACGTGAATCACAAGCCCAGCAACACCAAGGTGGACAAGAAAGTT |
| | | GAGCCCAAATCTTGTGACAAAACTCACACATGCCCACCGTGCCC |
| | | AGCACCTGAACTCCTGGGGGGACCGTCAGTCTTCCTCTTCCCCC |
| | | CAAAACCCAAGGACACCCTCATGATCTCCCGGACCCCTGAGGTC |
| | | ACATGCGTGGTGGTGGACGTGAGCCACGAAGACCCTGAGGTCAA |
| | | GTTCAACTGGTACGTGGACGGCGTGGAGGTGCATAATGCCAAGA |
| | | CAAAGCCGCGGGAGGAGCAGTACAACAGCACGTACCGTGTGGTC |
| | | AGCGTCCTCACCGTCCTGCACCAGGACTGGCTGAATGGCAAGGA |
| | | GTACAAGTGCAAGGTGTCCAACAAAGCCCTCCCAGCCCCCATCG |
| | | AGAAAACCATCTCCAAAGCCAAAGGGCAGCCCCGAGAACCACAG |
| | | GTGTACACCCTGCCCCCATCCCGGGAGGAGATGACCAAGAACCA |
| | | GGTCAGCCTGACCTGCCTGGTCAAAGGCTTCTATCCCAGCGACA |
| | | TCGCCGTGGAGTGGGAGAGCAATGGGCAGCCGGAGAACAACTAC |
| | | AAGACCACGCCTCCCGTGCTGGACTCCGACGGCTCCTTCTTCCT |
| | | CTATAGCAAGCTCACCGTGGACAAGAGCAGGTGGCAGCAGGGGA |
| | | ACGTCTTCTCATGCTCCGTGATGCATGAGGCTCTGCACAACCAC |
| | | TACACGCAGAAGAGCCTCTCCCTGTCTCCGGGCAAATAG |
| 607 | Antibody 4.1 IgG1 LC | GAAATTGTGTTGACGCAGTCTCCGGGCACCCTGTCTTTGTCTCC |
| | (VH: M41L_S42Q_L111R_V112S, VL: | AGGGGAAAGCGCCACCCTCTCCTGTAGGGTCAGTCAGAGTGTCA |
| | S18R_S136P)_huIgG1z | GCAGCAGCCAGTTAGCCTGGTACCAGCAGAAACCTGGCCAGGCT |
| | mAb(LC: R18S, HC: G65Q_G66L) | CCCAGGCTCCTCATCTATGGTGCATCCAGCAGGGCCACTGGCAT |
| | DNA | CCCAGACAGGTTCAGTGGCAGTGGGTCTGGGACAGACTTCACTC |
| | | TCACCATCAGCAGACTGGAGCCTGAAGATTTTGCAGTGTATTAC |
| | | TGTCAGCAGTATGGTAACCCCCGGACGTTCGGCCAAGGGACCAA |
| | | GGTGGAAATCAAACGAACGGTGGCTGCACCATCTGTCTTCATCT |
| | | TCCCGCCATCTGATGAGCAGTTGAAATCTGGAACTGCCTCTGTT |
| | | GTGTGCCTGCTGAATAACTTCTATCCCAGAGAGGCCAAAGTACA |
| | | GTGGAAGGTGGATAACGCCCTCCAATCGGGTAACTCCCAGGAGA |
| | | GTGTCACAGAGCAGGACAGCAAGGACAGCACCTACAGCCTCAGC |
| | | AGCACCCTGACGCTGAGCAAAGCAGACTACGAGAAACACAAAGT |
| | | CTACGCCTGCGAAGTCACCCATCAGGGCCTGAGCTCGCCCGTCA |
| | | CAAAGAGCTTCAACAGGGGAGAGTGTTAG |
| 608 | Antibody 4.2 IgG1 HC | GAGGTGCAGCTGGTGGAGTCTGGGGGAGGCTTGGTAAAGCCTGG |
| | (VH: M41L_S42Q_L111R_V112S, VL: | GGGGTCCCTTAGACTCTCCTGTGCAGCCTCTGGATTCATTTTCA |
| | S18R_S136P)_huIgG1z | GTAACGCCTGGCTGCAGTGGGTCCGCCAGGCTCCAGGGAAGGGG |
| | mAb(LC: R18S, HC: G65A_G66S) | CTGGAGTGGGTTGGCCGTATCAAAAGGAAAACTGATGCCAGCAC |
| | DNA | AACAGACTACGCTGCACCCGTGAAAGGCAGATTCACCATCTCAA |
| | | GAGATGATTCAAAAAACACGTTGTATCTGCTAATGAACAGCCTG |
| | | AAAATCGAGGACACAGCCGTGTATTATTGTACCGTCGTAACTAG |
| | | AAGCCGGGGAATTATCTTTGACTACTGGGGCCAGGGAACCCTGG |
| | | TCACCGTGTCCTCAGCCTCCACCAAGGGCCCATCGGTCTTCCCC |
| | | CTGGCACCCTCCTCCAAGAGCACCTCTGGGGGCACAGCGGCCCT |
| | | GGGCTGCCTGGTCAAGGACTACTTCCCCGAACCGGTGACGGTGT |
| | | CGTGGAACTCAGGCGCCCTGACCAGCGGCGTGCACACCTTCCCG |
| | | GCTGTCCTACAGTCCTCAGGACTCTACTCCCTCAGCAGCGTGGT |
| | | GACCGTGCCCTCCAGCAGCTTGGGCACCCAGACCTACATCTGCA |
| | | ACGTGAATCACAAGCCCAGCAACACCAAGGTGGACAAGAAAGTT |
| | | GAGCCCAAATCTTGTGACAAAACTCACACATGCCCACCGTGCCC |
| | | AGCACCTGAACTCCTGGGGGGACCGTCAGTCTTCCTCTTCCCCC |
| | | CAAAACCCAAGGACACCCTCATGATCTCCCGGACCCCTGAGGTC |
| | | ACATGCGTGGTGGTGGACGTGAGCCACGAAGACCCTGAGGTCAA |
| | | GTTCAACTGGTACGTGGACGGCGTGGAGGTGCATAATGCCAAGA |
| | | CAAAGCCGCGGGAGGAGCAGTACAACAGCACGTACCGTGTGGTC |
| | | AGCGTCCTCACCGTCCTGCACCAGGACTGGCTGAATGGCAAGGA |
| | | GTACAAGTGCAAGGTGTCCAACAAAGCCCTCCCAGCCCCCATCG |
| | | AGAAAACCATCTCCAAAGCCAAAGGGCAGCCCCGAGAACCACAG |
| | | GTGTACACCCTGCCCCCATCCCGGGAGGAGATGACCAAGAACCA |
| | | GGTCAGCCTGACCTGCCTGGTCAAAGGCTTCTATCCCAGCGACA |
| | | TCGCCGTGGAGTGGGAGAGCAATGGGCAGCCGGAGAACAACTAC |
| | | AAGACCACGCCTCCCGTGCTGGACTCCGACGGCTCCTTCTTCCT |
| | | CTATAGCAAGCTCACCGTGGACAAGAGCAGGTGGCAGCAGGGGA |
| | | ACGTCTTCTCATGCTCCGTGATGCATGAGGCTCTGCACAACCAC |
| | | TACACGCAGAAGAGCCTCTCCCTGTCTCCGGGCAAATAG |
| 609 | Antibody 4.2 IgG1 LC | GAAATTGTGTTGACGCAGTCTCCGGGCACCCTGTCTTTGTCTCC |
| | (VH: M41L_S42Q_L111R_V112S, VL: | AGGGGAAAGCGCCACCCTCTCCTGTAGGGTCAGTCAGAGTGTCA |
| | S18R_S136P)_huIgG1z | GCAGCAGCCAGTTAGCCTGGTACCAGCAGAAACCTGGCCAGGCT |
| | mAb(LC: R18S, HC: G65A_G66S) | CCCAGGCTCCTCATCTATGGTGCATCCAGCAGGGCCACTGGCAT |
| | DNA | CCCAGACAGGTTCAGTGGCAGTGGGTCTGGGACAGACTTCACTC |
| | | TCACCATCAGCAGACTGGAGCCTGAAGATTTTGCAGTGTATTAC |
| | | TGTCAGCAGTATGGTAACCCCCGGACGTTCGGCCAAGGGACCAA |
| | | GGTGGAAATCAAACGAACGGTGGCTGCACCATCTGTCTTCATCT |
| | | TCCCGCCATCTGATGAGCAGTTGAAATCTGGAACTGCCTCTGTT |
| | | GTGTGCCTGCTGAATAACTTCTATCCCAGAGAGGCCAAAGTACA |
| | | GTGGAAGGTGGATAACGCCCTCCAATCGGGTAACTCCCAGGAGA |
| | | GTGTCACAGAGCAGGACAGCAAGGACAGCACCTACAGCCTCAGC |
| | | AGCACCCTGACGCTGAGCAAAGCAGACTACGAGAAACACAAAGT |
| | | CTACGCCTGCGAAGTCACCCATCAGGGCCTGAGCTCGCCCGTCA |
| | | CAAAGAGCTTCAACAGGGGAGAGTGTTAG |
| 610 | Antibody 5.0 IgG1 HC DNA | CAGGTGCAGCTGGTGGAGTCTGGGGGAGGCGTGGTCCAGCCTGG |
| | | GAGGTCCCTGAGACTCTCCTGTGCAGCCTCTGGATTCACCTTCA |
| | | GTAGCTATGGCATGCACTGGGTCCGCCAGGCTCCAGGCAAGGGG |
| | | CTGGAGTGGGTGGCAGTTATATCATATGATGGAAGTAATAAATA |
| | | CTATGCAGACTCCGTGAAGGGCCGATTCACCATCTCCAGAGACA |
| | | ATTCCAAGAACACGCTGTATCTGCAAATGAACAGCCTGAGAGCT |
| | | GAGGACACGGCTGTGTATTACTGTGCGAGGGGGCGATATTTTGA |
| | | CTGGTTCCTCTTTGACTACTGGGGCCAGGGAACCCTGGTCACCG |
| | | TCTCCTCAGCCTCCACCAAGGGCCCATCGGTCTTCCCCCTGGCA |
| | | CCCTCCTCCAAGAGCACCTCTGGGGGCACAGCGGCCCTGGGCTG |
| | | CCTGGTCAAGGACTACTTCCCCGAACCGGTGACGGTGTCGTGGA |
| | | ACTCAGGCGCCCTGACCAGCGGCGTGCACACCTTCCCGGCTGTC |
| | | CTACAGTCCTCAGGACTCTACTCCCTCAGCAGCGTGGTGACCGT |
| | | GCCCTCCAGCAGCTTGGGCACCCAGACCTACATCTGCAACGTGA |
| | | ATCACAAGCCCAGCAACACCAAGGTGGACAAGAAAGTTGAGCCC |
| | | AAATCTTGTGACAAAACTCACACATGCCCACCGTGCCCAGCACC |
| | | TGAACTCCTGGGGGGACCGTCAGTCTTCCTCTTCCCCCCAAAAC |
| | | CCAAGGACACCCTCATGATCTCCCGGACCCCTGAGGTCACATGC |
| | | GTGGTGGTGGACGTGAGCCACGAAGACCCTGAGGTCAAGTTCAA |
| | | CTGGTACGTGGACGGCGTGGAGGTGCATAATGCCAAGACAAAGC |
| | | CGCGGGAGGAGCAGTACAACAGCACGTACCGTGTGGTCAGCGTC |
| | | CTCACCGTCCTGCACCAGGACTGGCTGAATGGCAAGGAGTACAA |
| | | GTGCAAGGTGTCCAACAAAGCCCTCCCAGCCCCCATCGAGAAAA |
| | | CCATCTCCAAAGCCAAAGGGCAGCCCCGAGAACCACAGGTGTAC |
| | | ACCCTGCCCCCATCCCGGGAGGAGATGACCAAGAACCAGGTCAG |
| | | CCTGACCTGCCTGGTCAAAGGCTTCTATCCCAGCGACATCGCCG |
| | | TGGAGTGGGAGAGCAATGGGCAGCCGGAGAACAACTACAAGACC |
| | | ACGCCTCCCGTGCTGGACTCCGACGGCTCCTTCTTCCTCTATAG |
| | | CAAGCTCACCGTGGACAAGAGCAGGTGGCAGCAGGGGAACGTCT |
| | | TCTCATGCTCCGTGATGCATGAGGCTCTGCACAACCACTACACG |
| | | CAGAAGAGCCTCTCCCTGTCTCCGGGCAAATAG |
| 611 | Antibody 5.0 IgG1 LC DNA | GATACTGTGATGACCCAGACTCCACTCTCTCTGTCCGTCACCCC |
| | | TGGACAGCCGGCCTCCATCTCCTGCAAGTCTAGTCAGAGCCTCC |
| | | TACATAGTGATGGAAAGACCTATTTGTTTTGGTACCTGCAGAAG |
| | | CCAGGCCAGCCTCCACAGCTCCTGATCAGTGAAGTTTCCAACCG |
| | | GTTCTCTGGAGTGCCAGATAGGTTCAGTGGCAGCGGGTCAGGGA |
| | | CAGATTTCACACTGAAAATCAGCCGTGTGGAGGCTGAGGATGTT |
| | | GGGTTTTATTACTGCATGCAAAGTTTACGGCTTCCGCTCACTTT |
| | | CGGCGGAGGGACCAAGGTGGAGATCAAACGAACGGTGGCTGCAC |
| | | CATCTGTCTTCATCTTCCCGCCATCTGATGAGCAGTTGAAATCT |
| | | GGAACTGCCTCTGTTGTGTGCCTGCTGAATAACTTCTATCCCAG |
| | | AGAGGCCAAAGTACAGTGGAAGGTGGATAACGCCCTCCAATCGG |
| | | GTAACTCCCAGGAGAGTGTCACAGAGCAGGACAGCAAGGACAGC |
| | | ACCTACAGCCTCAGCAGCACCCTGACGCTGAGCAAAGCAGACTA |
| | | CGAGAAACACAAAGTCTACGCCTGCGAAGTCACCCATCAGGGCC |
| | | TGAGCTCGCCCGTCACAAAGAGCTTCAACAGGGGAGAGTGTTAG |
| 612 | Antibody 5.1 IgG1 HC | CAGGTGCAGCTGGTGGAGTCTGGGGGAGGCGTGGTCCAGCCTGG |
| | (VH: F134T, VL: S34R_S57Y_F103V) | GAGGTCCCTGAGACTCTCCTGTGCAGCCTCTGGATTCACCTTCA |
| | huIgG1z mAb DNA | GTAGCTATGGCATGCACTGGGTCCGCCAGGCTCCAGGCAAGGGG |
| | | CTGGAGTGGGTGGCAGTTATCTCATATGATGGAAGTAATAAATA |
| | | CTATGCAGACTCCGTGAAGGGCCGATTCACCATCTCCAGAGACA |
| | | ATTCCAAGAACACGCTGTATCTGCAAATGAACAGCCTGAGAGCT |
| | | GAGGACACGGCTGTGTATTACTGTGCGAGGGGGCGATATTTTGA |
| | | CTGGACCCTCTTTGACTACTGGGGCCAGGGAACCCTGGTCACCG |
| | | TGTCCTCAGCCTCCACCAAGGGCCCATCGGTCTTCCCCCTGGCA |
| | | CCCTCCTCCAAGAGCACCTCTGGGGGCACAGCGGCCCTGGGCTG |
| | | CCTGGTCAAGGACTACTTCCCCGAACCGGTGACGGTGTCGTGGA |
| | | ACTCAGGCGCCCTGACCAGCGGCGTGCACACCTTCCCGGCTGTC |
| | | CTACAGTCCTCAGGACTCTACTCCCTCAGCAGCGTGGTGACCGT |
| | | GCCCTCCAGCAGCTTGGGCACCCAGACCTACATCTGCAACGTGA |
| | | ATCACAAGCCCAGCAACACCAAGGTGGACAAGAAAGTTGAGCCC |
| | | AAATCTTGTGACAAAACTCACACATGCCCACCGTGCCCAGCACC |
| | | TGAACTCCTGGGGGGACCGTCAGTCTTCCTCTTCCCCCCAAAAC |
| | | CCAAGGACACCCTCATGATCTCCCGGACCCCTGAGGTCACATGC |
| | | GTGGTGGTGGACGTGAGCCACGAAGACCCTGAGGTCAAGTTCAA |
| | | CTGGTACGTGGACGGCGTGGAGGTGCATAATGCCAAGACAAAGC |
| | | CGCGGGAGGAGCAGTACAACAGCACGTACCGTGTGGTCAGCGTC |
| | | CTCACCGTCCTGCACCAGGACTGGCTGAATGGCAAGGAGTACAA |
| | | GTGCAAGGTGTCCAACAAAGCCCTCCCAGCCCCCATCGAGAAAA |
| | | CCATCTCCAAAGCCAAAGGGCAGCCCCGAGAACCACAGGTGTAC |
| | | ACCCTGCCCCCATCCCGGGAGGAGATGACCAAGAACCAGGTCAG |
| | | CCTGACCTGCCTGGTCAAAGGCTTCTATCCCAGCGACATCGCCG |
| | | TGGAGTGGGAGAGCAATGGGCAGCCGGAGAACAACTACAAGACC |
| | | ACGCCTCCCGTGCTGGACTCCGACGGCTCCTTCTTCCTCTATAG |
| | | CAAGCTCACCGTGGACAAGAGCAGGTGGCAGCAGGGGAACGTCT |
| | | TCTCATGCTCCGTGATGCATGAGGCTCTGCACAACCACTACACG |
| | | CAGAAGAGCCTCTCCCTGTCTCCGGGCAAATAG |
| 613 | Antibody 5.1 IgG1 LC | GATACTGTGATGACCCAGACTCCACTCTCTCTGTCCGTCACCCC |
| | (VH: F134T, VL: S34R_S57Y_F103V) | TGGACAGCCGGCCTCCATCTCCTGCAAGTCTAGTCAGAGCCTCC |
| | huIgG1z mAb DNA | TACATAGAGATGGAAAGACCTATTTGTTTTGGTACCTGCAGAAG |
| | | CCAGGCCAGCCTCCACAGCTCCTGATCTACGAAGTTTCCAACCG |
| | | GTTCTCTGGAGTGCCAGATAGGTTCAGTGGCAGCGGGTCAGGGA |
| | | CAGATTTCACACTGAAAATCAGCCGTGTGGAGGCTGAGGATGTT |
| | | GGGGTGTATTACTGCATGCAAAGTTTACGGCTTCCGCTCACTTT |
| | | CGGCGGAGGGACCAAGGTGGAGATCAAACGAACGGTGGCTGCAC |
| | | CATCTGTCTTCATCTTCCCGCCATCTGATGAGCAGTTGAAATCT |
| | | GGAACTGCCTCTGTTGTGTGCCTGCTGAATAACTTCTATCCCAG |
| | | AGAGGCCAAAGTACAGTGGAAGGTGGATAACGCCCTCCAATCGG |
| | | GTAACTCCCAGGAGAGTGTCACAGAGCAGGACAGCAAGGACAGC |
| | | ACCTACAGCCTCAGCAGCACCCTGACGCTGAGCAAAGCAGACTA |
| | | CGAGAAACACAAAGTCTACGCCTGCGAAGTCACCCATCAGGGCC |
| | | TGAGCTCGCCCGTCACAAAGAGCTTCAACAGGGGAGAGTGTTAG |
| 614 | Antibody 5.2 IgG1 HC | CAGGTGCAGCTGGTGGAGTCTGGGGGAGGCGTGGTCCAGCCTGG |
| | (VH: G40PF134T, VL: S57Y_E58L_ | GAGGTCCCTGAGACTCTCCTGTGCAGCCTCTGGATTCACCTTCA |
| | V67R_F103V)_huIgG1z mAb DNA | GTAGCTATCCCATGCACTGGGTCCGCCAGGCTCCAGGCAAGGGG |
| | | CTGGAGTGGGTGGCAGTTATCTCATATGATGGAAGTAATAAATA |
| | | CTATGCAGACTCCGTGAAGGGCCGATTCACCATCTCCAGAGACA |
| | | ATTCCAAGAACACGCTGTATCTGCAAATGAACAGCCTGAGAGCT |
| | | GAGGACACGGCTGTGTATTACTGTGCGAGGGGGCGATATTTTGA |
| | | CTGGACCCTCTTTGACTACTGGGGCCAGGGAACCCTGGTCACCG |
| | | TGTCCTCAGCCTCCACCAAGGGCCCATCGGTCTTCCCCCTGGCA |
| | | CCCTCCTCCAAGAGCACCTCTGGGGGCACAGCGGCCCTGGGCTG |
| | | CCTGGTCAAGGACTACTTCCCCGAACCGGTGACGGTGTCGTGGA |
| | | ACTCAGGCGCCCTGACCAGCGGCGTGCACACCTTCCCGGCTGTC |
| | | CTACAGTCCTCAGGACTCTACTCCCTCAGCAGCGTGGTGACCGT |
| | | GCCCTCCAGCAGCTTGGGCACCCAGACCTACATCTGCAACGTGA |
| | | ATCACAAGCCCAGCAACACCAAGGTGGACAAGAAAGTTGAGCCC |
| | | AAATCTTGTGACAAAACTCACACATGCCCACCGTGCCCAGCACC |
| | | TGAACTCCTGGGGGGACCGTCAGTCTTCCTCTTCCCCCCAAAAC |
| | | CCAAGGACACCCTCATGATCTCCCGGACCCCTGAGGTCACATGC |
| | | GTGGTGGTGGACGTGAGCCACGAAGACCCTGAGGTCAAGTTCAA |
| | | CTGGTACGTGGACGGCGTGGAGGTGCATAATGCCAAGACAAAGC |
| | | CGCGGGAGGAGCAGTACAACAGCACGTACCGTGTGGTCAGCGTC |
| | | CTCACCGTCCTGCACCAGGACTGGCTGAATGGCAAGGAGTACAA |
| | | GTGCAAGGTGTCCAACAAAGCCCTCCCAGCCCCCATCGAGAAAA |
| | | CCATCTCCAAAGCCAAAGGGCAGCCCCGAGAACCACAGGTGTAC |
| | | ACCCTGCCCCCATCCCGGGAGGAGATGACCAAGAACCAGGTCAG |
| | | CCTGACCTGCCTGGTCAAAGGCTTCTATCCCAGCGACATCGCCG |
| | | TGGAGTGGGAGAGCAATGGGCAGCCGGAGAACAACTACAAGACC |
| | | ACGCCTCCCGTGCTGGACTCCGACGGCTCCTTCTTCCTCTATAG |
| | | CAAGCTCACCGTGGACAAGAGCAGGTGGCAGCAGGGGAACGTCT |
| | | TCTCATGCTCCGTGATGCATGAGGCTCTGCACAACCACTACACG |
| | | CAGAAGAGCCTCTCCCTGTCTCCGGGCAAATAG |
| 615 | Antibody 5.2 IgG1 LC | GATACTGTGATGACCCAGACTCCACTCTCTCTGTCCGTCACCCC |
| | (VH: G40PF134T, VL: S57Y_E58L_ | TGGACAGCCGGCCTCCATCTCCTGCAAGTCTAGTCAGAGCCTCC |
| | V67R_F103V)_huIgG1z mAb DNA | TACATAGTGATGGAAAGACCTATTTGTTTTGGTACCTGCAGAAG |
| | | CCAGGCCAGCCTCCACAGCTCCTGATCTACCTGAGATCCAACCG |
| | | GTTCTCTGGAGTGCCAGATAGGTTCAGTGGCAGCGGGTCAGGGA |
| | | CAGATTTCACACTGAAAATCAGCCGTGTGGAGGCTGAGGATGTT |
| | | GGGGTGTATTACTGCATGCAAAGTTTACGGCTTCCGCTCACTTT |
| | | CGGCGGAGGGACCAAGGTGGAGATCAAACGAACGGTGGCTGCAC |
| | | CATCTGTCTTCATCTTCCCGCCATCTGATGAGCAGTTGAAATCT |
| | | GGAACTGCCTCTGTTGTGTGCCTGCTGAATAACTTCTATCCCAG |
| | | AGAGGCCAAAGTACAGTGGAAGGTGGATAACGCCCTCCAATCGG |
| | | GTAACTCCCAGGAGAGTGTCACAGAGCAGGACAGCAAGGACAGC |
| | | ACCTACAGCCTCAGCAGCACCCTGACGCTGAGCAAAGCAGACTA |
| | | CGAGAAACACAAAGTCTACGCCTGCGAAGTCACCCATCAGGGCC |
| | | TGAGCTCGCCCGTCACAAAGAGCTTCAACAGGGGAGAGTGTTAG |
| 616 | Antibody 5.3 IgG1 HC | CAGGTGCAGCTGGTGGAGTCTGGGGGAGGCGTGGTCCAGCCTGG |
| | (VH: A71S_D72R, VL: S57Y_E58L_ | GAGGTCCCTGAGACTCTCCTGTGCAGCCTCTGGATTCACCTTCA |
| | V67S_F103V)_huIgG1z mAb DNA | GTAGCTATGGCATGCACTGGGTCCGCCAGGCTCCAGGCAAGGGG |
| | | CTGGAGTGGGTGGCAGTTATCTCATATGATGGAAGTAATAAATA |
| | | CTATAGCAGATCCGTGAAGGGCCGATTCACCATCTCCAGAGACA |
| | | ATTCCAAGAACACGCTGTATCTGCAAATGAACAGCCTGAGAGCT |
| | | GAGGACACGGCTGTGTATTACTGTGCGAGGGGGCGATATTTTGA |
| | | CTGGTTCCTCTTTGACTACTGGGGCCAGGGAACCCTGGTCACCG |
| | | TGTCCTCAGCCTCCACCAAGGGCCCATCGGTCTTCCCCCTGGCA |
| | | CCCTCCTCCAAGAGCACCTCTGGGGGCACAGCGGCCCTGGGCTG |
| | | CCTGGTCAAGGACTACTTCCCCGAACCGGTGACGGTGTCGTGGA |
| | | ACTCAGGCGCCCTGACCAGCGGCGTGCACACCTTCCCGGCTGTC |
| | | CTACAGTCCTCAGGACTCTACTCCCTCAGCAGCGTGGTGACCGT |
| | | GCCCTCCAGCAGCTTGGGCACCCAGACCTACATCTGCAACGTGA |
| | | ATCACAAGCCCAGCAACACCAAGGTGGACAAGAAAGTTGAGCCC |
| | | AAATCTTGTGACAAAACTCACACATGCCCACCGTGCCCAGCACC |
| | | TGAACTCCTGGGGGGACCGTCAGTCTTCCTCTTCCCCCCAAAAC |
| | | CCAAGGACACCCTCATGATCTCCCGGACCCCTGAGGTCACATGC |
| | | GTGGTGGTGGACGTGAGCCACGAAGACCCTGAGGTCAAGTTCAA |
| | | CTGGTACGTGGACGGCGTGGAGGTGCATAATGCCAAGACAAAGC |
| | | CGCGGGAGGAGCAGTACAACAGCACGTACCGTGTGGTCAGCGTC |
| | | CTCACCGTCCTGCACCAGGACTGGCTGAATGGCAAGGAGTACAA |
| | | GTGCAAGGTGTCCAACAAAGCCCTCCCAGCCCCCATCGAGAAAA |
| | | CCATCTCCAAAGCCAAAGGGCAGCCCCGAGAACCACAGGTGTAC |
| | | ACCCTGCCCCCATCCCGGGAGGAGATGACCAAGAACCAGGTCAG |
| | | CCTGACCTGCCTGGTCAAAGGCTTCTATCCCAGCGACATCGCCG |
| | | TGGAGTGGGAGAGCAATGGGCAGCCGGAGAACAACTACAAGACC |
| | | ACGCCTCCCGTGCTGGACTCCGACGGCTCCTTCTTCCTCTATAG |
| | | CAAGCTCACCGTGGACAAGAGCAGGTGGCAGCAGGGGAACGTCT |
| | | TCTCATGCTCCGTGATGCATGAGGCTCTGCACAACCACTACACG |
| | | CAGAAGAGCCTCTCCCTGTCTCCGGGCAAATAG |
| 617 | Antibody 5.3 IgG1 LC | GATACTGTGATGACCCAGACTCCACTCTCTCTGTCCGTCACCCC |
| | (VH: A71S_D72R, VL: S57Y_E58L_ | TGGACAGCCGGCCTCCATCTCCTGCAAGTCTAGTCAGAGCCTCC |
| | V67S_F103V)_huIgG1z mAb DNA | TACATAGTGATGGAAAGACCTATTTGTTTTGGTACCTGCAGAAG |
| | | CCAGGCCAGCCTCCACAGCTCCTGATCTACCTGAGCTCCAACCG |
| | | GTTCTCTGGAGTGCCAGATAGGTTCAGTGGCAGCGGGTCAGGGA |
| | | CAGATTTCACACTGAAAATCAGCCGTGTGGAGGCTGAGGATGTT |
| | | GGGGTGTATTACTGCATGCAAAGTTTACGGCTTCCGCTCACTTT |
| | | CGGCGGAGGGACCAAGGTGGAGATCAAACGAACGGTGGCTGCAC |
| | | CATCTGTCTTCATCTTCCCGCCATCTGATGAGCAGTTGAAATCT |
| | | GGAACTGCCTCTGTTGTGTGCCTGCTGAATAACTTCTATCCCAG |
| | | AGAGGCCAAAGTACAGTGGAAGGTGGATAACGCCCTCCAATCGG |
| | | GTAACTCCCAGGAGAGTGTCACAGAGCAGGACAGCAAGGACAGC |
| | | ACCTACAGCCTCAGCAGCACCCTGACGCTGAGCAAAGCAGACTA |
| | | CGAGAAACACAAAGTCTACGCCTGCGAAGTCACCCATCAGGGCC |
| | | TGAGCTCGCCCGTCACAAAGAGCTTCAACAGGGGAGAGTGTTAG |
| 618 | Antibody 5.4 IgG1 HC | CAGGTGCAGCTGGTGGAGTCTGGGGGAGGCGTGGTCCAGCCTGG |
| | (VH: G40A, VL: S57Y_E58L_V67T_ | GAGGTCCCTGAGACTCTCCTGTGCAGCCTCTGGATTCACCTTCA |
| | F103V)_huIgG1z mAb DNA | GTAGCTATGCCATGCACTGGGTCCGCCAGGCTCCAGGCAAGGGG |
| | | CTGGAGTGGGTGGCAGTTATCTCATATGATGGAAGTAATAAATA |
| | | CTATGCAGACTCCGTGAAGGGCCGATTCACCATCTCCAGAGACA |
| | | ATTCCAAGAACACGCTGTATCTGCAAATGAACAGCCTGAGAGCT |
| | | GAGGACACGGCTGTGTATTACTGTGCGAGGGGGCGATATTTTGA |
| | | CTGGTTCCTCTTTGACTACTGGGGCCAGGGAACCCTGGTCACCG |
| | | TGTCCTCAGCCTCCACCAAGGGCCCATCGGTCTTCCCCCTGGCA |
| | | CCCTCCTCCAAGAGCACCTCTGGGGGCACAGCGGCCCTGGGCTG |
| | | CCTGGTCAAGGACTACTTCCCCGAACCGGTGACGGTGTCGTGGA |
| | | ACTCAGGCGCCCTGACCAGCGGCGTGCACACCTTCCCGGCTGTC |
| | | CTACAGTCCTCAGGACTCTACTCCCTCAGCAGCGTGGTGACCGT |
| | | GCCCTCCAGCAGCTTGGGCACCCAGACCTACATCTGCAACGTGA |
| | | ATCACAAGCCCAGCAACACCAAGGTGGACAAGAAAGTTGAGCCC |
| | | AAATCTTGTGACAAAACTCACACATGCCCACCGTGCCCAGCACC |
| | | TGAACTCCTGGGGGGACCGTCAGTCTTCCTCTTCCCCCCAAAAC |
| | | CCAAGGACACCCTCATGATCTCCCGGACCCCTGAGGTCACATGC |
| | | GTGGTGGTGGACGTGAGCCACGAAGACCCTGAGGTCAAGTTCAA |
| | | CTGGTACGTGGACGGCGTGGAGGTGCATAATGCCAAGACAAAGC |
| | | CGCGGGAGGAGCAGTACAACAGCACGTACCGTGTGGTCAGCGTC |
| | | CTCACCGTCCTGCACCAGGACTGGCTGAATGGCAAGGAGTACAA |
| | | GTGCAAGGTGTCCAACAAAGCCCTCCCAGCCCCCATCGAGAAAA |
| | | CCATCTCCAAAGCCAAAGGGCAGCCCCGAGAACCACAGGTGTAC |
| | | ACCCTGCCCCCATCCCGGGAGGAGATGACCAAGAACCAGGTCAG |
| | | CCTGACCTGCCTGGTCAAAGGCTTCTATCCCAGCGACATCGCCG |
| | | TGGAGTGGGAGAGCAATGGGCAGCCGGAGAACAACTACAAGACC |
| | | ACGCCTCCCGTGCTGGACTCCGACGGCTCCTTCTTCCTCTATAG |
| | | CAAGCTCACCGTGGACAAGAGCAGGTGGCAGCAGGGGAACGTCT |
| | | TCTCATGCTCCGTGATGCATGAGGCTCTGCACAACCACTACACG |
| | | CAGAAGAGCCTCTCCCTGTCTCCGGGCAAATAG |
| 619 | Antibody 5.4 IgG1 LC | GATACTGTGATGACCCAGACTCCACTCTCTCTGTCCGTCACCCC |
| | (VH: G40A, VL: S57Y_E58L_V67T_ | TGGACAGCCGGCCTCCATCTCCTGCAAGTCTAGTCAGAGCCTCC |
| | F103V)_huIgG1z mAb DNA | TACATAGTGATGGAAAGACCTATTTGTTTTGGTACCTGCAGAAG |
| | | CCAGGCCAGCCTCCACAGCTCCTGATCTACCTGACCTCCAACCG |
| | | GTTCTCTGGAGTGCCAGATAGGTTCAGTGGCAGCGGGTCAGGGA |
| | | CAGATTTCACACTGAAAATCAGCCGTGTGGAGGCTGAGGATGTT |
| | | GGGGTGTATTACTGCATGCAAAGTTTACGGCTTCCGCTCACTTT |
| | | CGGCGGAGGGACCAAGGTGGAGATCAAACGAACGGTGGCTGCAC |
| | | CATCTGTCTTCATCTTCCCGCCATCTGATGAGCAGTTGAAATCT |
| | | GGAACTGCCTCTGTTGTGTGCCTGCTGAATAACTTCTATCCCAG |
| | | AGAGGCCAAAGTACAGTGGAAGGTGGATAACGCCCTCCAATCGG |
| | | GTAACTCCCAGGAGAGTGTCACAGAGCAGGACAGCAAGGACAGC |
| | | ACCTACAGCCTCAGCAGCACCCTGACGCTGAGCAAAGCAGACTA |
| | | CGAGAAACACAAAGTCTACGCCTGCGAAGTCACCCATCAGGGCC |
| | | TGAGCTCGCCCGTCACAAAGAGCTTCAACAGGGGAGAGTGTTAG |
| 620 | Antibody 5.5 IgG1 HC | CAGGTGCAGCTGGTGGAGTCTGGGGGAGGCGTGGTCCAGCCTGG |
| | (VH: G40P_M41V, VL: S57Y_E58L_ | GAGGTCCCTGAGACTCTCCTGTGCAGCCTCTGGATTCACCTTCA |
| | V67T_F103V)_huIgG1z mAb DNA | GTAGCTATCCCGTGCACTGGGTCCGCCAGGCTCCAGGCAAGGGG |
| | | CTGGAGTGGGTGGCAGTTATCTCATATGATGGAAGTAATAAATA |
| | | CTATGCAGACTCCGTGAAGGGCCGATTCACCATCTCCAGAGACA |
| | | ATTCCAAGAACACGCTGTATCTGCAAATGAACAGCCTGAGAGCT |
| | | GAGGACACGGCTGTGTATTACTGTGCGAGGGGGCGATATTTTGA |
| | | CTGGTTCCTCTTTGACTACTGGGGCCAGGGAACCCTGGTCACCG |
| | | TGTCCTCAGCCTCCACCAAGGGCCCATCGGTCTTCCCCCTGGCA |
| | | CCCTCCTCCAAGAGCACCTCTGGGGGCACAGCGGCCCTGGGCTG |
| | | CCTGGTCAAGGACTACTTCCCCGAACCGGTGACGGTGTCGTGGA |
| | | ACTCAGGCGCCCTGACCAGCGGCGTGCACACCTTCCCGGCTGTC |
| | | CTACAGTCCTCAGGACTCTACTCCCTCAGCAGCGTGGTGACCGT |
| | | GCCCTCCAGCAGCTTGGGCACCCAGACCTACATCTGCAACGTGA |
| | | ATCACAAGCCCAGCAACACCAAGGTGGACAAGAAAGTTGAGCCC |
| | | AAATCTTGTGACAAAACTCACACATGCCCACCGTGCCCAGCACC |
| | | TGAACTCCTGGGGGGACCGTCAGTCTTCCTCTTCCCCCCAAAAC |
| | | CCAAGGACACCCTCATGATCTCCCGGACCCCTGAGGTCACATGC |
| | | GTGGTGGTGGACGTGAGCCACGAAGACCCTGAGGTCAAGTTCAA |
| | | CTGGTACGTGGACGGCGTGGAGGTGCATAATGCCAAGACAAAGC |
| | | CGCGGGAGGAGCAGTACAACAGCACGTACCGTGTGGTCAGCGTC |
| | | CTCACCGTCCTGCACCAGGACTGGCTGAATGGCAAGGAGTACAA |
| | | GTGCAAGGTGTCCAACAAAGCCCTCCCAGCCCCCATCGAGAAAA |
| | | CCATCTCCAAAGCCAAAGGGCAGCCCCGAGAACCACAGGTGTAC |
| | | ACCCTGCCCCCATCCCGGGAGGAGATGACCAAGAACCAGGTCAG |
| | | CCTGACCTGCCTGGTCAAAGGCTTCTATCCCAGCGACATCGCCG |
| | | TGGAGTGGGAGAGCAATGGGCAGCCGGAGAACAACTACAAGACC |
| | | ACGCCTCCCGTGCTGGACTCCGACGGCTCCTTCTTCCTCTATAG |
| | | CAAGCTCACCGTGGACAAGAGCAGGTGGCAGCAGGGGAACGTCT |
| | | TCTCATGCTCCGTGATGCATGAGGCTCTGCACAACCACTACACG |
| | | CAGAAGAGCCTCTCCCTGTCTCCGGGCAAATAG |
| 621 | Antibody 5.5 IgG1 LC | GATACTGTGATGACCCAGACTCCACTCTCTCTGTCCGTCACCCC |
| | (VH: G40P_M41V, VL: S57Y_E58L_ | TGGACAGCCGGCCTCCATCTCCTGCAAGTCTAGTCAGAGCCTCC |
| | V67T_F103V)_huIgG1z mAb DNA | TACATAGTGATGGAAAGACCTATTTGTTTTGGTACCTGCAGAAG |
| | | CCAGGCCAGCCTCCACAGCTCCTGATCTACCTGACCTCCAACCG |
| | | GTTCTCTGGAGTGCCAGATAGGTTCAGTGGCAGCGGGTCAGGGA |
| | | CAGATTTCACACTGAAAATCAGCCGTGTGGAGGCTGAGGATGTT |
| | | GGGGTGTATTACTGCATGCAAAGTTTACGGCTTCCGCTCACTTT |
| | | CGGCGGAGGGACCAAGGTGGAGATCAAACGAACGGTGGCTGCAC |
| | | CATCTGTCTTCATCTTCCCGCCATCTGATGAGCAGTTGAAATCT |
| | | GGAACTGCCTCTGTTGTGTGCCTGCTGAATAACTTCTATCCCAG |
| | | AGAGGCCAAAGTACAGTGGAAGGTGGATAACGCCCTCCAATCGG |
| | | GTAACTCCCAGGAGAGTGTCACAGAGCAGGACAGCAAGGACAGC |
| | | ACCTACAGCCTCAGCAGCACCCTGACGCTGAGCAAAGCAGACTA |
| | | CGAGAAACACAAAGTCTACGCCTGCGAAGTCACCCATCAGGGCC |
| | | TGAGCTCGCCCGTCACAAAGAGCTTCAACAGGGGAGAGTGTTAG |
| 622 | Antibody 5.6 IgG1 HC | CAGGTGCAGCTGGTGGAGTCTGGGGGAGGCGTGGTCCAGCCTGG |
| | (VH: F134T, VL: S34R_S57Y_F103V)_ | GAGGTCCCTGAGACTCTCCTGTGCAGCCTCTGGATTCACCTTCA |
| | huIgG1z | GTAGCTATGGCATGCACTGGGTCCGCCAGGCTCCAGGCAAGGGG |
| | mAb(LC: G37A_K38R_M107L) DNA | CTGGAGTGGGTGGCAGTTATCTCATATGATGGAAGTAATAAATA |
| | | CTATGCAGACTCCGTGAAGGGCCGATTCACCATCTCCAGAGACA |
| | | ATTCCAAGAACACGCTGTATCTGCAAATGAACAGCCTGAGAGCT |
| | | GAGGACACGGCTGTGTATTACTGTGCGAGGGGGCGATATTTTGA |
| | | CTGGACCCTCTTTGACTACTGGGGCCAGGGAACCCTGGTCACCG |
| | | TGTCCTCAGCCTCCACCAAGGGCCCATCGGTCTTCCCCCTGGCA |
| | | CCCTCCTCCAAGAGCACCTCTGGGGGCACAGCGGCCCTGGGCTG |
| | | CCTGGTCAAGGACTACTTCCCCGAACCGGTGACGGTGTCGTGGA |
| | | ACTCAGGCGCCCTGACCAGCGGCGTGCACACCTTCCCGGCTGTC |
| | | CTACAGTCCTCAGGACTCTACTCCCTCAGCAGCGTGGTGACCGT |
| | | GCCCTCCAGCAGCTTGGGCACCCAGACCTACATCTGCAACGTGA |
| | | ATCACAAGCCCAGCAACACCAAGGTGGACAAGAAAGTTGAGCCC |
| | | AAATCTTGTGACAAAACTCACACATGCCCACCGTGCCCAGCACC |
| | | TGAACTCCTGGGGGGACCGTCAGTCTTCCTCTTCCCCCCAAAAC |
| | | CCAAGGACACCCTCATGATCTCCCGGACCCCTGAGGTCACATGC |
| | | GTGGTGGTGGACGTGAGCCACGAAGACCCTGAGGTCAAGTTCAA |
| | | CTGGTACGTGGACGGCGTGGAGGTGCATAATGCCAAGACAAAGC |
| | | CGCGGGAGGAGCAGTACAACAGCACGTACCGTGTGGTCAGCGTC |
| | | CTCACCGTCCTGCACCAGGACTGGCTGAATGGCAAGGAGTACAA |
| | | GTGCAAGGTGTCCAACAAAGCCCTCCCAGCCCCCATCGAGAAAA |
| | | CCATCTCCAAAGCCAAAGGGCAGCCCCGAGAACCACAGGTGTAC |
| | | ACCCTGCCCCCATCCCGGGAGGAGATGACCAAGAACCAGGTCAG |
| | | CCTGACCTGCCTGGTCAAAGGCTTCTATCCCAGCGACATCGCCG |
| | | TGGAGTGGGAGAGCAATGGGCAGCCGGAGAACAACTACAAGACC |
| | | ACGCCTCCCGTGCTGGACTCCGACGGCTCCTTCTTCCTCTATAG |
| | | CAAGCTCACCGTGGACAAGAGCAGGTGGCAGCAGGGGAACGTCT |
| | | TCTCATGCTCCGTGATGCATGAGGCTCTGCACAACCACTACACG |
| | | CAGAAGAGCCTCTCCCTGTCTCCGGGCAAATAG |
| 623 | Antibody 5.6 IgG1 LC | GATACTGTGATGACCCAGACTCCACTCTCTCTGTCCGTCACCCC |
| | (VH: F134T, VL: S34R_S57Y_F103V)_ | TGGACAGCCGGCCTCCATCTCCTGCAAGTCTAGTCAGAGCCTCC |
| | huIgG1z | TACATAGAGATGCCAGAACCTATTTGTTTTGGTACCTGCAGAAG |
| | mAb(LC: G37A_K38R_M107L) DNA | CCAGGCCAGCCTCCACAGCTCCTGATCTACGAAGTTTCCAACCG |
| | | GTTCTCTGGAGTGCCAGATAGGTTCAGTGGCAGCGGGTCAGGGA |
| | | CAGATTTCACACTGAAAATCAGCCGTGTGGAGGCTGAGGATGTT |
| | | GGGGTGTATTACTGCCTGCAAAGTTTACGGCTTCCGCTCACTTT |
| | | CGGCGGAGGGACCAAGGTGGAGATCAAACGAACGGTGGCTGCAC |
| | | CATCTGTCTTCATCTTCCCGCCATCTGATGAGCAGTTGAAATCT |
| | | GGAACTGCCTCTGTTGTGTGCCTGCTGAATAACTTCTATCCCAG |
| | | AGAGGCCAAAGTACAGTGGAAGGTGGATAACGCCCTCCAATCGG |
| | | GTAACTCCCAGGAGAGTGTCACAGAGCAGGACAGCAAGGACAGC |
| | | ACCTACAGCCTCAGCAGCACCCTGACGCTGAGCAAAGCAGACTA |
| | | CGAGAAACACAAAGTCTACGCCTGCGAAGTCACCCATCAGGGCC |
| | | TGAGCTCGCCCGTCACAAAGAGCTTCAACAGGGGAGAGTGTTAG |
| 624 | Antibody 5.7 IgG1 HC | CAGGTGCAGCTGGTGGAGTCTGGGGGAGGCGTGGTCCAGCCTGG |
| | (VH: A71S_D72R, VL: S57Y_E58L_ | GAGGTCCCTGAGACTCTCCTGTGCAGCCTCTGGATTCACCTTCA |
| | V67S_F103V)_huIgG1z | GTAGCTATGGCATGCACTGGGTCCGCCAGGCTCCAGGCAAGGGG |
| | mAb(LC: G37A_K38R_M107L) DNA | CTGGAGTGGGTGGCAGTTATCTCATATGATGGAAGTAATAAATA |
| | | CTATAGCAGATCCGTGAAGGGCCGATTCACCATCTCCAGAGACA |
| | | ATTCCAAGAACACGCTGTATCTGCAAATGAACAGCCTGAGAGCT |
| | | GAGGACACGGCTGTGTATTACTGTGCGAGGGGGCGATATTTTGA |
| | | CTGGTTCCTCTTTGACTACTGGGGCCAGGGAACCCTGGTCACCG |
| | | TGTCCTCAGCCTCCACCAAGGGCCCATCGGTCTTCCCCCTGGCA |
| | | CCCTCCTCCAAGAGCACCTCTGGGGGCACAGCGGCCCTGGGCTG |
| | | CCTGGTCAAGGACTACTTCCCCGAACCGGTGACGGTGTCGTGGA |
| | | ACTCAGGCGCCCTGACCAGCGGCGTGCACACCTTCCCGGCTGTC |
| | | CTACAGTCCTCAGGACTCTACTCCCTCAGCAGCGTGGTGACCGT |
| | | GCCCTCCAGCAGCTTGGGCACCCAGACCTACATCTGCAACGTGA |
| | | ATCACAAGCCCAGCAACACCAAGGTGGACAAGAAAGTTGAGCCC |
| | | AAATCTTGTGACAAAACTCACACATGCCCACCGTGCCCAGCACC |
| | | TGAACTCCTGGGGGGACCGTCAGTCTTCCTCTTCCCCCCAAAAC |
| | | CCAAGGACACCCTCATGATCTCCCGGACCCCTGAGGTCACATGC |
| | | GTGGTGGTGGACGTGAGCCACGAAGACCCTGAGGTCAAGTTCAA |
| | | CTGGTACGTGGACGGCGTGGAGGTGCATAATGCCAAGACAAAGC |
| | | CGCGGGAGGAGCAGTACAACAGCACGTACCGTGTGGTCAGCGTC |
| | | CTCACCGTCCTGCACCAGGACTGGCTGAATGGCAAGGAGTACAA |
| | | GTGCAAGGTGTCCAACAAAGCCCTCCCAGCCCCCATCGAGAAAA |
| | | CCATCTCCAAAGCCAAAGGGCAGCCCCGAGAACCACAGGTGTAC |
| | | ACCCTGCCCCCATCCCGGGAGGAGATGACCAAGAACCAGGTCAG |
| | | CCTGACCTGCCTGGTCAAAGGCTTCTATCCCAGCGACATCGCCG |
| | | TGGAGTGGGAGAGCAATGGGCAGCCGGAGAACAACTACAAGACC |
| | | ACGCCTCCCGTGCTGGACTCCGACGGCTCCTTCTTCCTCTATAG |
| | | CAAGCTCACCGTGGACAAGAGCAGGTGGCAGCAGGGGAACGTCT |
| | | TCTCATGCTCCGTGATGCATGAGGCTCTGCACAACCACTACACG |
| | | CAGAAGAGCCTCTCCCTGTCTCCGGGCAAATAG |
| 625 | Antibody 5.7 IgG1 LC | GATACTGTGATGACCCAGACTCCACTCTCTCTGTCCGTCACCCC |
| | (VH: A71 S_D72R, VL: S57Y_E58L_ | TGGACAGCCGGCCTCCATCTCCTGCAAGTCTAGTCAGAGCCTCC |
| | V67S_F103V)_huIgG1z | TACATAGTGATGCCAGAACCTATTTGTTTTGGTACCTGCAGAAG |
| | mAb(LC: G37A_K38R_M107L) DNA | CCAGGCCAGCCTCCACAGCTCCTGATCTACCTGAGCTCCAACCG |
| | | GTTCTCTGGAGTGCCAGATAGGTTCAGTGGCAGCGGGTCAGGGA |
| | | CAGATTTCACACTGAAAATCAGCCGTGTGGAGGCTGAGGATGTT |
| | | GGGGTGTATTACTGCCTGCAAAGTTTACGGCTTCCGCTCACTTT |
| | | CGGCGGAGGGACCAAGGTGGAGATCAAACGAACGGTGGCTGCAC |
| | | CATCTGTCTTCATCTTCCCGCCATCTGATGAGCAGTTGAAATCT |
| | | GGAACTGCCTCTGTTGTGTGCCTGCTGAATAACTTCTATCCCAG |
| | | AGAGGCCAAAGTACAGTGGAAGGTGGATAACGCCCTCCAATCGG |
| | | GTAACTCCCAGGAGAGTGTCACAGAGCAGGACAGCAAGGACAGC |
| | | ACCTACAGCCTCAGCAGCACCCTGACGCTGAGCAAAGCAGACTA |
| | | CGAGAAACACAAAGTCTACGCCTGCGAAGTCACCCATCAGGGCC |
| | | TGAGCTCGCCCGTCACAAAGAGCTTCAACAGGGGAGAGTGTTAG |
| 626 | Antibody 5.8 IgG1 HC | CAGGTGCAGCTGGTGGAGTCTGGGGGAGGCGTGGTCCAGCCTGG |
| | (VH: G40PF134T, VL: S5 7YE5 8L_ | GAGGTCCCTGAGACTCTCCTGTGCAGCCTCTGGATTCACCTTCA |
| | V67R_F103V)_huIgG1z | GTAGCTATCCCATGCACTGGGTCCGCCAGGCTCCAGGCAAGGGG |
| | mAb(LC: G37A_K38R_M107L) DNA | CTGGAGTGGGTGGCAGTTATCTCATATGATGGAAGTAATAAATA |
| | | CTATGCAGACTCCGTGAAGGGCCGATTCACCATCTCCAGAGACA |
| | | ATTCCAAGAACACGCTGTATCTGCAAATGAACAGCCTGAGAGCT |
| | | GAGGACACGGCTGTGTATTACTGTGCGAGGGGGCGATATTTTGA |
| | | CTGGACCCTCTTTGACTACTGGGGCCAGGGAACCCTGGTCACCG |
| | | TGTCCTCAGCCTCCACCAAGGGCCCATCGGTCTTCCCCCTGGCA |
| | | CCCTCCTCCAAGAGCACCTCTGGGGGCACAGCGGCCCTGGGCTG |
| | | CCTGGTCAAGGACTACTTCCCCGAACCGGTGACGGTGTCGTGGA |
| | | ACTCAGGCGCCCTGACCAGCGGCGTGCACACCTTCCCGGCTGTC |
| | | CTACAGTCCTCAGGACTCTACTCCCTCAGCAGCGTGGTGACCGT |
| | | GCCCTCCAGCAGCTTGGGCACCCAGACCTACATCTGCAACGTGA |
| | | ATCACAAGCCCAGCAACACCAAGGTGGACAAGAAAGTTGAGCCC |
| | | AAATCTTGTGACAAAACTCACACATGCCCACCGTGCCCAGCACC |
| | | TGAACTCCTGGGGGGACCGTCAGTCTTCCTCTTCCCCCCAAAAC |
| | | CCAAGGACACCCTCATGATCTCCCGGACCCCTGAGGTCACATGC |
| | | GTGGTGGTGGACGTGAGCCACGAAGACCCTGAGGTCAAGTTCAA |
| | | CTGGTACGTGGACGGCGTGGAGGTGCATAATGCCAAGACAAAGC |
| | | CGCGGGAGGAGCAGTACAACAGCACGTACCGTGTGGTCAGCGTC |
| | | CTCACCGTCCTGCACCAGGACTGGCTGAATGGCAAGGAGTACAA |
| | | GTGCAAGGTGTCCAACAAAGCCCTCCCAGCCCCCATCGAGAAAA |
| | | CCATCTCCAAAGCCAAAGGGCAGCCCCGAGAACCACAGGTGTAC |
| | | ACCCTGCCCCCATCCCGGGAGGAGATGACCAAGAACCAGGTCAG |
| | | CCTGACCTGCCTGGTCAAAGGCTTCTATCCCAGCGACATCGCCG |
| | | TGGAGTGGGAGAGCAATGGGCAGCCGGAGAACAACTACAAGACC |
| | | ACGCCTCCCGTGCTGGACTCCGACGGCTCCTTCTTCCTCTATAG |
| | | CAAGCTCACCGTGGACAAGAGCAGGTGGCAGCAGGGGAACGTCT |
| | | TCTCATGCTCCGTGATGCATGAGGCTCTGCACAACCACTACACG |
| | | CAGAAGAGCCTCTCCCTGTCTCCGGGCAAATAG |
| 627 | Antibody 5.8 IgG1 LC | GATACTGTGATGACCCAGACTCCACTCTCTCTGTCCGTCACCCC |
| | (VH: G40P_F134T, VL: S57Y_E58L_ | TGGACAGCCGGCCTCCATCTCCTGCAAGTCTAGTCAGAGCCTCC |
| | V67R_F103V)_huIgG1z | TACATAGTGATGCCAGAACCTATTTGTTTTGGTACCTGCAGAAG |
| | mAb(LC: G37A_K38R_M107L) DNA | CCAGGCCAGCCTCCACAGCTCCTGATCTACCTGAGATCCAACCG |
| | | GTTCTCTGGAGTGCCAGATAGGTTCAGTGGCAGCGGGTCAGGGA |
| | | CAGATTTCACACTGAAAATCAGCCGTGTGGAGGCTGAGGATGTT |
| | | GGGGTGTATTACTGCCTGCAAAGTTTACGGCTTCCGCTCACTTT |
| | | CGGCGGAGGGACCAAGGTGGAGATCAAACGAACGGTGGCTGCAC |
| | | CATCTGTCTTCATCTTCCCGCCATCTGATGAGCAGTTGAAATCT |
| | | GGAACTGCCTCTGTTGTGTGCCTGCTGAATAACTTCTATCCCAG |
| | | AGAGGCCAAAGTACAGTGGAAGGTGGATAACGCCCTCCAATCGG |
| | | GTAACTCCCAGGAGAGTGTCACAGAGCAGGACAGCAAGGACAGC |
| | | ACCTACAGCCTCAGCAGCACCCTGACGCTGAGCAAAGCAGACTA |
| | | CGAGAAACACAAAGTCTACGCCTGCGAAGTCACCCATCAGGGCC |
| | | TGAGCTCGCCCGTCACAAAGAGCTTCAACAGGGGAGAGTGTTAG |
| 628 | Antibody 5.9 IgG1 HC | CAGGTGCAGCTGGTGGAGTCTGGGGGAGGCGTGGTCCAGCCTGG |
| | (VH: G40A, VL: S57Y_E58L_V67T_ | GAGGTCCCTGAGACTCTCCTGTGCAGCCTCTGGATTCACCTTCA |
| | F103V)_huIgG1z | GTAGCTATGCCATGCACTGGGTCCGCCAGGCTCCAGGCAAGGGG |
| | mAb(LC: G37A_K38R_M107L) DNA | CTGGAGTGGGTGGCAGTTATCTCATATGATGGAAGTAATAAATA |
| | | CTATGCAGACTCCGTGAAGGGCCGATTCACCATCTCCAGAGACA |
| | | ATTCCAAGAACACGCTGTATCTGCAAATGAACAGCCTGAGAGCT |
| | | GAGGACACGGCTGTGTATTACTGTGCGAGGGGGCGATATTTTGA |
| | | CTGGTTCCTCTTTGACTACTGGGGCCAGGGAACCCTGGTCACCG |
| | | TGTCCTCAGCCTCCACCAAGGGCCCATCGGTCTTCCCCCTGGCA |
| | | CCCTCCTCCAAGAGCACCTCTGGGGGCACAGCGGCCCTGGGCTG |
| | | CCTGGTCAAGGACTACTTCCCCGAACCGGTGACGGTGTCGTGGA |
| | | ACTCAGGCGCCCTGACCAGCGGCGTGCACACCTTCCCGGCTGTC |
| | | CTACAGTCCTCAGGACTCTACTCCCTCAGCAGCGTGGTGACCGT |
| | | GCCCTCCAGCAGCTTGGGCACCCAGACCTACATCTGCAACGTGA |
| | | ATCACAAGCCCAGCAACACCAAGGTGGACAAGAAAGTTGAGCCC |
| | | AAATCTTGTGACAAAACTCACACATGCCCACCGTGCCCAGCACC |
| | | TGAACTCCTGGGGGGACCGTCAGTCTTCCTCTTCCCCCCAAAAC |
| | | CCAAGGACACCCTCATGATCTCCCGGACCCCTGAGGTCACATGC |
| | | GTGGTGGTGGACGTGAGCCACGAAGACCCTGAGGTCAAGTTCAA |
| | | CTGGTACGTGGACGGCGTGGAGGTGCATAATGCCAAGACAAAGC |
| | | CGCGGGAGGAGCAGTACAACAGCACGTACCGTGTGGTCAGCGTC |
| | | CTCACCGTCCTGCACCAGGACTGGCTGAATGGCAAGGAGTACAA |
| | | GTGCAAGGTGTCCAACAAAGCCCTCCCAGCCCCCATCGAGAAAA |
| | | CCATCTCCAAAGCCAAAGGGCAGCCCCGAGAACCACAGGTGTAC |
| | | ACCCTGCCCCCATCCCGGGAGGAGATGACCAAGAACCAGGTCAG |
| | | CCTGACCTGCCTGGTCAAAGGCTTCTATCCCAGCGACATCGCCG |
| | | TGGAGTGGGAGAGCAATGGGCAGCCGGAGAACAACTACAAGACC |
| | | ACGCCTCCCGTGCTGGACTCCGACGGCTCCTTCTTCCTCTATAG |
| | | CAAGCTCACCGTGGACAAGAGCAGGTGGCAGCAGGGGAACGTCT |
| | | TCTCATGCTCCGTGATGCATGAGGCTCTGCACAACCACTACACG |
| | | CAGAAGAGCCTCTCCCTGTCTCCGGGCAAATAG |
| 629 | Antibody 5.9 IgG1 LC | GATACTGTGATGACCCAGACTCCACTCTCTCTGTCCGTCACCCC |
| | (VH: G40A, VL: S57Y_E58L_V67T_ | TGGACAGCCGGCCTCCATCTCCTGCAAGTCTAGTCAGAGCCTCC |
| | F103V)_huIgG1z | TACATAGTGATGCCAGAACCTATTTGTTTTGGTACCTGCAGAAG |
| | mAb(LC: G37A_K38R_M107L) DNA | CCAGGCCAGCCTCCACAGCTCCTGATCTACCTGACCTCCAACCG |
| | | GTTCTCTGGAGTGCCAGATAGGTTCAGTGGCAGCGGGTCAGGGA |
| | | CAGATTTCACACTGAAAATCAGCCGTGTGGAGGCTGAGGATGTT |
| | | GGGGTGTATTACTGCCTGCAAAGTTTACGGCTTCCGCTCACTTT |
| | | CGGCGGAGGGACCAAGGTGGAGATCAAACGAACGGTGGCTGCAC |
| | | CATCTGTCTTCATCTTCCCGCCATCTGATGAGCAGTTGAAATCT |
| | | GGAACTGCCTCTGTTGTGTGCCTGCTGAATAACTTCTATCCCAG |
| | | AGAGGCCAAAGTACAGTGGAAGGTGGATAACGCCCTCCAATCGG |
| | | GTAACTCCCAGGAGAGTGTCACAGAGCAGGACAGCAAGGACAGC |
| | | ACCTACAGCCTCAGCAGCACCCTGACGCTGAGCAAAGCAGACTA |
| | | CGAGAAACACAAAGTCTACGCCTGCGAAGTCACCCATCAGGGCC |
| | | TGAGCTCGCCCGTCACAAAGAGCTTCAACAGGGGAGAGTGTTAG |
| 630 | Antibody 6.0 IgG1 HC DNA | CAGGTGCAGCTGGTGGAGTCTGGGGGAGGCGTGGTCCAGCCTGG |
| | | GAGGTCCCTGAGACTCTCCTGTGAAGCCTCTGGATTCACCTTCA |
| | | GTAGCTATGTCATGCACTGGGTCCGCCAGGCTCCAGGCAAGGGG |
| | | CTGGAGTGGGTGTCAGTTATATCATATGATGGAAGTAGTCAATA |
| | | CTATACAGACTCCGTGAAGGGCCGATTCACCATCTCCAGAGACA |
| | | ATTCCAAGAATACGCTGAATCTGCAAATGAACAGCCTGAGAGCT |
| | | GAGGACACGGCTGTGTATTACTGTGTGAGAGGCCGTTTGGCCAC |
| | | TGCTATCCTCTTTGACTACTGGGGCCAGGGAACCCTGGTCACCG |
| | | TCTCCTCAGCCTCCACCAAGGGCCCATCGGTCTTCCCCCTGGCA |
| | | CCCTCCTCCAAGAGCACCTCTGGGGGCACAGCGGCCCTGGGCTG |
| | | CCTGGTCAAGGACTACTTCCCCGAACCGGTGACGGTGTCGTGGA |
| | | ACTCAGGCGCCCTGACCAGCGGCGTGCACACCTTCCCGGCTGTC |
| | | CTACAGTCCTCAGGACTCTACTCCCTCAGCAGCGTGGTGACCGT |
| | | GCCCTCCAGCAGCTTGGGCACCCAGACCTACATCTGCAACGTGA |
| | | ATCACAAGCCCAGCAACACCAAGGTGGACAAGAAAGTTGAGCCC |
| | | AAATCTTGTGACAAAACTCACACATGCCCACCGTGCCCAGCACC |
| | | TGAACTCCTGGGGGGACCGTCAGTCTTCCTCTTCCCCCCAAAAC |
| | | CCAAGGACACCCTCATGATCTCCCGGACCCCTGAGGTCACATGC |
| | | GTGGTGGTGGACGTGAGCCACGAAGACCCTGAGGTCAAGTTCAA |
| | | CTGGTACGTGGACGGCGTGGAGGTGCATAATGCCAAGACAAAGC |
| | | CGCGGGAGGAGCAGTACAACAGCACGTACCGTGTGGTCAGCGTC |
| | | CTCACCGTCCTGCACCAGGACTGGCTGAATGGCAAGGAGTACAA |
| | | GTGCAAGGTGTCCAACAAAGCCCTCCCAGCCCCCATCGAGAAAA |
| | | CCATCTCCAAAGCCAAAGGGCAGCCCCGAGAACCACAGGTGTAC |
| | | ACCCTGCCCCCATCCCGGGAGGAGATGACCAAGAACCAGGTCAG |
| | | CCTGACCTGCCTGGTCAAAGGCTTCTATCCCAGCGACATCGCCG |
| | | TGGAGTGGGAGAGCAATGGGCAGCCGGAGAACAACTACAAGACC |
| | | ACGCCTCCCGTGCTGGACTCCGACGGCTCCTTCTTCCTCTATAG |
| | | CAAGCTCACCGTGGACAAGAGCAGGTGGCAGCAGGGGAACGTCT |
| | | TCTCATGCTCCGTGATGCATGAGGCTCTGCACAACCACTACACG |
| | | CAGAAGAGCCTCTCCCTGTCTCCGGGCAAATAG |
| 631 | Antibody 6.0 IgG1 LC DNA | GATATTTTGATGACCCAGACTCCACTCTCTCTGTCCGTCACCCC |
| | | TGGACAGCCGGCCTCCATCTCCTGCAAGTCTAGCCAGAGCCTCC |
| | | TATATAGTGATGGAAAGACCTATTTATTTTGGTACCTGCAGAGG |
| | | CCAGGCCAACCTCCACAGCTCCTGATCTATGAAGTTTCCAACCG |
| | | GTTCTCTGGAGTGCCAGATAGGTTCAGTGGCAGCGGGTCAGGGA |
| | | CAGATTTCACACTGAAAATCAGCCGGGTGGAGGCTGAGGATGTT |
| | | GGGATTTATTACTGCATGCAAAGTATAAAACTTCCTCTCACTTT |
| | | CGGCGGAGGGACCAAGGTGGAGATCAAACGAACGGTGGCTGCAC |
| | | CATCTGTCTTCATCTTCCCGCCATCTGATGAGCAGTTGAAATCT |
| | | GGAACTGCCTCTGTTGTGTGCCTGCTGAATAACTTCTATCCCAG |
| | | AGAGGCCAAAGTACAGTGGAAGGTGGATAACGCCCTCCAATCGG |
| | | GTAACTCCCAGGAGAGTGTCACAGAGCAGGACAGCAAGGACAGC |
| | | ACCTACAGCCTCAGCAGCACCCTGACGCTGAGCAAAGCAGACTA |
| | | CGAGAAACACAAAGTCTACGCCTGCGAAGTCACCCATCAGGGCC |
| | | TGAGCTCGCCCGTCACAAAGAGCTTCAACAGGGGAGAGTGTTAG |
| 632 | Antibody 6.1 IgG1 HC | CAGGTGCAGCTGGTGGAGTCTGGGGGAGGCGTGGTCCAGCCTGG |
| | (VH: S67R_A114S_I134P, VL: F71L)_ | GAGGTCCCTGAGACTCTCCTGTGAAGCCTCTGGATTCACCTTCA |
| | huIgG1z mAb DNA | GTAGCTATGTCATGCACTGGGTCCGCCAGGCTCCAGGCAAGGGG |
| | | CTGGAGTGGGTGTCAGTTATCTCATATGATGGAAGTAGACAATA |
| | | CTATACAGACTCCGTGAAGGGCCGATTCACCATCTCCAGAGACA |
| | | ATTCCAAGAATACGCTGAATCTGCAAATGAACAGCCTGAGAGCT |
| | | GAGGACACGGCTGTGTATTACTGTGTGAGAGGCCGTTTGGCCAC |
| | | TAGCCCCCTCTTTGACTACTGGGGCCAGGGAACCCTGGTCACCG |
| | | TGTCCTCAGCCTCCACCAAGGGCCCATCGGTCTTCCCCCTGGCA |
| | | CCCTCCTCCAAGAGCACCTCTGGGGGCACAGCGGCCCTGGGCTG |
| | | CCTGGTCAAGGACTACTTCCCCGAACCGGTGACGGTGTCGTGGA |
| | | ACTCAGGCGCCCTGACCAGCGGCGTGCACACCTTCCCGGCTGTC |
| | | CTACAGTCCTCAGGACTCTACTCCCTCAGCAGCGTGGTGACCGT |
| | | GCCCTCCAGCAGCTTGGGCACCCAGACCTACATCTGCAACGTGA |
| | | ATCACAAGCCCAGCAACACCAAGGTGGACAAGAAAGTTGAGCCC |
| | | AAATCTTGTGACAAAACTCACACATGCCCACCGTGCCCAGCACC |
| | | TGAACTCCTGGGGGGACCGTCAGTCTTCCTCTTCCCCCCAAAAC |
| | | CCAAGGACACCCTCATGATCTCCCGGACCCCTGAGGTCACATGC |
| | | GTGGTGGTGGACGTGAGCCACGAAGACCCTGAGGTCAAGTTCAA |
| | | CTGGTACGTGGACGGCGTGGAGGTGCATAATGCCAAGACAAAGC |
| | | CGCGGGAGGAGCAGTACAACAGCACGTACCGTGTGGTCAGCGTC |
| | | CTCACCGTCCTGCACCAGGACTGGCTGAATGGCAAGGAGTACAA |
| | | GTGCAAGGTGTCCAACAAAGCCCTCCCAGCCCCCATCGAGAAAA |
| | | CCATCTCCAAAGCCAAAGGGCAGCCCCGAGAACCACAGGTGTAC |
| | | ACCCTGCCCCCATCCCGGGAGGAGATGACCAAGAACCAGGTCAG |
| | | CCTGACCTGCCTGGTCAAAGGCTTCTATCCCAGCGACATCGCCG |
| | | TGGAGTGGGAGAGCAATGGGCAGCCGGAGAACAACTACAAGACC |
| | | ACGCCTCCCGTGCTGGACTCCGACGGCTCCTTCTTCCTCTATAG |
| | | CAAGCTCACCGTGGACAAGAGCAGGTGGCAGCAGGGGAACGTCT |
| | | TCTCATGCTCCGTGATGCATGAGGCTCTGCACAACCACTACACG |
| | | CAGAAGAGCCTCTCCCTGTCTCCGGGCAAATAG |
| 633 | Antibody 6.1 IgG1 LC | GATATTTTGATGACCCAGACTCCACTCTCTCTGTCCGTCACCCC |
| | (VH: S67R_A114S_I134P, VL: F71L)_ | TGGACAGCCGGCCTCCATCTCCTGCAAGTCTAGCCAGAGCCTCC |
| | huIgG1z mAb DNA | TATATAGTGATGGAAAGACCTATTTATTTTGGTACCTGCAGAGG |
| | | CCAGGCCAACCTCCACAGCTCCTGATCTATGAAGTTTCCAACCG |
| | | GCTGTCTGGAGTGCCAGATAGGTTCAGTGGCAGCGGGTCAGGGA |
| | | CAGATTTCACACTGAAAATCAGCCGGGTGGAGGCTGAGGATGTT |
| | | GGGATTTATTACTGCATGCAAAGTATCAAACTTCCTCTCACTTT |
| | | CGGCGGAGGGACCAAGGTGGAGATCAAACGAACGGTGGCTGCAC |
| | | CATCTGTCTTCATCTTCCCGCCATCTGATGAGCAGTTGAAATCT |
| | | GGAACTGCCTCTGTTGTGTGCCTGCTGAATAACTTCTATCCCAG |
| | | AGAGGCCAAAGTACAGTGGAAGGTGGATAACGCCCTCCAATCGG |
| | | GTAACTCCCAGGAGAGTGTCACAGAGCAGGACAGCAAGGACAGC |
| | | ACCTACAGCCTCAGCAGCACCCTGACGCTGAGCAAAGCAGACTA |
| | | CGAGAAACACAAAGTCTACGCCTGCGAAGTCACCCATCAGGGCC |
| | | TGAGCTCGCCCGTCACAAAGAGCTTCAACAGGGGAGAGTGTTAG |
| 634 | Antibody 6.2 IgG1 HC | CAGGTGCAGCTGGTGGAGTCTGGGGGAGGCGTGGTCCAGCCTGG |
| | (VH: S67R_Q68A_L135K_F136L, VL: | GAGGTCCCTGAGACTCTCCTGTGAAGCCTCTGGATTCACCTTCA |
| | S109T_I110L)_huIgG1z mAb DNA | GTAGCTATGTCATGCACTGGGTCCGCCAGGCTCCAGGCAAGGGG |
| | | CTGGAGTGGGTGTCAGTTATCTCATATGATGGAAGTAGAGCCTA |
| | | CTATACAGACTCCGTGAAGGGCCGATTCACCATCTCCAGAGACA |
| | | ATTCCAAGAATACGCTGAATCTGCAAATGAACAGCCTGAGAGCT |
| | | GAGGACACGGCTGTGTATTACTGTGTGAGAGGCCGTTTGGCCAC |
| | | TGCTATCAAGCTGGACTACTGGGGCCAGGGAACCCTGGTCACCG |
| | | TGTCCTCAGCCTCCACCAAGGGCCCATCGGTCTTCCCCCTGGCA |
| | | CCCTCCTCCAAGAGCACCTCTGGGGGCACAGCGGCCCTGGGCTG |
| | | CCTGGTCAAGGACTACTTCCCCGAACCGGTGACGGTGTCGTGGA |
| | | ACTCAGGCGCCCTGACCAGCGGCGTGCACACCTTCCCGGCTGTC |
| | | CTACAGTCCTCAGGACTCTACTCCCTCAGCAGCGTGGTGACCGT |
| | | GCCCTCCAGCAGCTTGGGCACCCAGACCTACATCTGCAACGTGA |
| | | ATCACAAGCCCAGCAACACCAAGGTGGACAAGAAAGTTGAGCCC |
| | | AAATCTTGTGACAAAACTCACACATGCCCACCGTGCCCAGCACC |
| | | TGAACTCCTGGGGGGACCGTCAGTCTTCCTCTTCCCCCCAAAAC |
| | | CCAAGGACACCCTCATGATCTCCCGGACCCCTGAGGTCACATGC |
| | | GTGGTGGTGGACGTGAGCCACGAAGACCCTGAGGTCAAGTTCAA |
| | | CTGGTACGTGGACGGCGTGGAGGTGCATAATGCCAAGACAAAGC |
| | | CGCGGGAGGAGCAGTACAACAGCACGTACCGTGTGGTCAGCGTC |
| | | CTCACCGTCCTGCACCAGGACTGGCTGAATGGCAAGGAGTACAA |
| | | GTGCAAGGTGTCCAACAAAGCCCTCCCAGCCCCCATCGAGAAAA |
| | | CCATCTCCAAAGCCAAAGGGCAGCCCCGAGAACCACAGGTGTAC |
| | | ACCCTGCCCCCATCCCGGGAGGAGATGACCAAGAACCAGGTCAG |
| | | CCTGACCTGCCTGGTCAAAGGCTTCTATCCCAGCGACATCGCCG |
| | | TGGAGTGGGAGAGCAATGGGCAGCCGGAGAACAACTACAAGACC |
| | | ACGCCTCCCGTGCTGGACTCCGACGGCTCCTTCTTCCTCTATAG |
| | | CAAGCTCACCGTGGACAAGAGCAGGTGGCAGCAGGGGAACGTCT |
| | | TCTCATGCTCCGTGATGCATGAGGCTCTGCACAACCACTACACG |
| | | CAGAAGAGCCTCTCCCTGTCTCCGGGCAAATAG |
| 635 | Antibody 6.2 IgG1 LC | GATATTTTGATGACCCAGACTCCACTCTCTCTGTCCGTCACCCC |
| | (VH: S67R_Q68A_L135K_F136L, VL: | TGGACAGCCGGCCTCCATCTCCTGCAAGTCTAGCCAGAGCCTCC |
| | S109T_I110L)_huIgG1z mAb DNA | TATATAGTGATGGAAAGACCTATTTATTTTGGTACCTGCAGAGG |
| | | CCAGGCCAACCTCCACAGCTCCTGATCTATGAAGTTTCCAACCG |
| | | GTTCTCTGGAGTGCCAGATAGGTTCAGTGGCAGCGGGTCAGGGA |
| | | CAGATTTCACACTGAAAATCAGCCGGGTGGAGGCTGAGGATGTT |
| | | GGGATTTATTACTGCATGCAAACCCTGAAACTTCCTCTCACTTT |
| | | CGGCGGAGGGACCAAGGTGGAGATCAAACGAACGGTGGCTGCAC |
| | | CATCTGTCTTCATCTTCCCGCCATCTGATGAGCAGTTGAAATCT |
| | | GGAACTGCCTCTGTTGTGTGCCTGCTGAATAACTTCTATCCCAG |
| | | AGAGGCCAAAGTACAGTGGAAGGTGGATAACGCCCTCCAATCGG |
| | | GTAACTCCCAGGAGAGTGTCACAGAGCAGGACAGCAAGGACAGC |
| | | ACCTACAGCCTCAGCAGCACCCTGACGCTGAGCAAAGCAGACTA |
| | | CGAGAAACACAAAGTCTACGCCTGCGAAGTCACCCATCAGGGCC |
| | | TGAGCTCGCCCGTCACAAAGAGCTTCAACAGGGGAGAGTGTTAG |

zeluvalimab HC without C-terminal lysine
(SEQ ID NO: 636)
EVQLLESGGGLVQPGGSLRLSCAASGFTFSSYDMSWVRQAPGKGLEWVS
LISGGGSQTYYAESVKGRFTISRDNSKNTLYLQMNSLRAEDTAVYFCAS
PSGHYFYAMDVWGQGTTVTVSSASTKGPSVFPLAPSSKSTSGGTAALGC
LVKDYFPEPVTVSWNSGALTSGVHTFPAVLQSSGLYSLSSVVTVPSSSL
GTQTYICNVNHKPSNTKVDKKVEPKSCDKTHTCPPCPAPELLGGPSVFL
FPPKPKDTLMISRTPEVTCVVVDVSHEDPEVKFNWYVDGVEVHNAKTKP
CEEQYGSTYRCVSVLTVLHQDWLNGKEYKCKVSNKALPAPIEKTISKAK
GQPREPQVYTLPPSREEMTKNQVSLTCLVKGFYPSDIAVEWESNGQPEN
NYKTTPPVLDSDGSFFLYSKLTVDKSRWQQGNVFSCSVMHEALHNHYTQ
KSLSLSPG

TABLE 19
Amino acid sequences of afucosy ated CCR8 mIgG2a antibody.

| SEQ ID NO: | Designation | Sequence |
|---|---|---|
| 637 | CCR8 mIgG2a LCDR1 | KYSQSLLHSDGKTYLF |
| 638 | CCR8 mIgG2a LCDR2 | EVSNRFS |
| 639 | CCR8 mIgG2a LCDR3 | MQTLKLPLT |
| 640 | CCR8 mIgG2a HCDR1 | NYGMH |
| 641 | CCR8 mIgG2a HCDR2 | VISYDGSRNFYADSVKG |
| 642 | CCR8 mIgG2a HCDR3 | AGGNGRFDY |
| 643 | CCR8 mIgG2a LCVR 1 | DIVMTQTPLSLSVTPGQPASISCKYSQSLLHS |
| | | DGKTYLFWYLQKPGQSPQLLIYEVSNRFSGV |
| | | PDRFSGSGSGTDFTLKISRVEAEDVGVYYCM |
| | | QTLKLPLTFGGGTKVEIKR |
| 644 | CCR8 mIgG2a HCVR | QVQLVESGGGVVQPGRSLRLSCAASGFTFSN |
| | | YGMHWVRQAPGKGLEWVAVISYDGSRNFY |
| | | ADSVKGRFTISRDNSKNTLYLQMNSLRAEDT |
| | | AVYYCARAGGNGRFDYWGQGTLVTVSS |
| 645 | CCR8 mIgG2a LC | DIVMTQTPLSLSVTPGQPASISCKYSQSLLHS |
| | | DGKTYLFWYLQKPGQSPQLLIYEVSNRFSGV |
| | | PDRFSGSGSGTDFTLKISRVEAEDVGVYYCM |
| | | QTLKLPLTFGGGTKVEIKRADAAPTVSIFPPS |
| | | SEQLTSGGASVVCFLNNFYPKDINVKWKIDG |
| | | SERQNGVLNSWTDQDSKDSTYSMSSTLTLTK |
| | | DEYERHNSYTCEATHKTSTSPIVKSFNRNEC |
| 646 | CCR8 mIgG2aHC | QVQLVESGGGVVQPGRSLRLSCAASGFTFSN |
| | | YGMHWVRQAPGKGLEWVAVISYDGSRNFY |
| | | ADSVKGRFTISRDNSKNTLYLQMNSLRAEDT |
| | | AVYYCARAGGNGRFDYWGQGTLVTVSSAK |
| | | TTAPSVYPLAPVCGDTTGSSVTLGCLVKGYF |
| | | PEPVTLTWNSGSLSSGVHTFPAVLQSDLYTLS |
| | | SSVTVTSSTWPSQSITCNVAHPASSTKVDKKI |
| | | EPRGPTIKPCPPCKCPAPNLLGGPSVFIFPPKIK |
| | | DVLMISLSPIVTCVVVDVSEDDPDVQISWFV |
| | | NNVEVHTAQTQTHREDYNSTLRVVSALPIQH |
| | | QDWMSGKEFKCKVNNKDLPAPIERTISKPKG |
| | | SVRAPQVYVLPPPEEEMTKKQVTLTCMVTD |
| | | FMPEDIYVEWTNNGKTELNYKNTEPVLDSD |
| | | GSYFMYSKLRVEKKNWVERNSYSCSVVHEG |
| | | LHNHHTTKSFSRTPGK |

TABLE 20
Amino acid sequences.

| SEQ | | |
|---|---|---|
| ID NO: | Designation | Sequence |
| 647 | MPK20298-A4_SCFV huCCR8 HV hv_cdr1 | NNGMH |
| 648 | MPK20298-A4_SCFV huCCR8 HV hv_cdr2 | VISNDGSNKYYADSVKG |
| 649 | MPK20298-A4_SCFV huCCR8 HV hv_cdr3 | VYYGSGIYYKNRNYYGMDV |
| 650 | MPK20298-A4_SCFV huCCR8 LV lv_cdr1 | GGNNIGSQNVH |
| 651 | MPK20298-A4_SCFV huCCR8 LV lv_cdr2 | RDSNRPS |
| 652 | MPK20298-A4_SCFV huCCR8 LV lv_cdr3 | QVWDSSTVV |
| 653 | MPK20299-D2_SCFV huCCR8 HV hv_cdr1 | NYGMH |
| 654 | MPK20299-D2_SCFV huCCR8 HV hv_cdr2 | VISYDGSNKYYADSVKG |
| 655 | MPK20299-D2_SCFV huCCR8 HV hv_cdr3 | VYYGSGIYYKKRYYYGMDV |
| 656 | MPK20299-D2_SCFV huCCR8 LV lv_cdr1 | GGHNIGSKGVH |
| 657 | MPK20299-D2_SCFV huCCR8 LV lv_cdr2 | RNSNRPS |
| 658 | MPK20299-D2_SCFV huCCR8 LV lv_cdr3 | QVWDSSTVV |
| 659 | MPK20299-F11_SCFV huCCR8 HV hv_cdr1 | NYGMH |
| 660 | MPK20299-F11_SCFV huCCR8 HV hv_cdr2 | VISYDGSNKYYADSVKG |
| 661 | MPK20299-F11_SCFV huCCR8 HV hv_cdr3 | VYYGSGSYYKKRYYYGMDV |
| 662 | MPK20299-F11_SCFV huCCR8 LV lv_cdr1 | GGNNIGSQNVH |
| 663 | MPK20299-F11_SCFV huCCR8 LV lv_cdr2 | RDSNRPS |
| 664 | MPK20299-F11_SCFV huCCR8 LV lv_cdr3 | QVWDSSTVV |
| 665 | MPK20298-H6_SCFV huCCR8 HV hv_cdr1 | SSGMH |
| 666 | MPK20298-H6_SCFV huCCR8 HV hv_cdr2 | VISYDGTNKYYADSVKG |
| 667 | MPK20298-H6_SCFV huCCR8 HV hv_cdr3 | VYYGSGIYYKNRYYYGMDV |
| 668 | MPK20298-H6_SCFV huCCR8 LV lv_cdr1 | GGHNIGSKGVH |
| 669 | MPK20298-H6_SCFV huCCR8 LV lv_cdr2 | RNSNRPS |
| 670 | MPK20298-H6_SCFV huCCR8 LV lv_cdr3 | QVWDSSTVV |
| 671 | MPK20297-A4_SCFV huCCR8 HV hv_cdr1 | NYGMH |
| 672 | MPK20297-A4_SCFV huCCR8 HV hv_cdr2 | VISNDGSNKYYADSVKG |
| 673 | MPK20297-A4_SCFV huCCR8 HV hv_cdr3 | VYYGSGIYYKKRYYYGMDV |
| 674 | MPK20297-A4_SCFV huCCR8 LV lv_cdr1 | GGHNIGSQNVH |
| 675 | MPK20297-A4_SCFV huCCR8 LV lv_cdr2 | RDSNRPS |
| 676 | MPK20297-A4_SCFV huCCR8 LV lv_cdr3 | QVWDSSTVV |
| 677 | MPK20299-H8_SCFV huCCR8 HV hv_cdr1 | NYGMH |
| 678 | MPK20299-H8_SCFV huCCR8 HV hv_cdr2 | VISYDGSNKYYADSVKG |
| 679 | MPK20299-H8_SCFV huCCR8 HV hv_cdr3 | VYYGSGIYYKKRYYYGMDV |
| 680 | MPK20299-H8_SCFV huCCR8 LV lv_cdr1 | GGNNIGSKNVH |
| 681 | MPK20299-H8_SCFV huCCR8 LV lv_cdr2 | RNSNRPS |
| 682 | MPK20299-H8_SCFV huCCR8 LV lv_cdr3 | QVWDSSTVV |
| 683 | MPK20300-C11_SCFV huCCR8 HV | SYGMH |
| | hv_cdr1 | |
| 684 | MPK20300-C11_SCFV huCCR8 HV | VISYDGSNKYYADSVKG |
| | hv_cdr2 | |
| 685 | MPK20300-C11_SCFV huCCR8 HV | VYYGSGSYYKNRYYYGMDV |
| | hv_cdr3 | |
| 686 | MPK20300-C11_SCFV huCCR8 LV lv_cdr1 | GGNNIGSKNVH |
| 687 | MPK20300-C11_SCFV huCCR8 LV lv_cdr2 | RDINRPS |
| 688 | MPK20300-C11_SCFV huCCR8 LV lv_cdr3 | QVWDSSVV |
| 689 | MPK20298-B1_SCFV huCCR8 HV hv_cdr1 | NYGMH |
| 690 | MPK20298-B1_SCFV huCCR8 HV hv_cdr2 | VISYDGSNKYYADSVKG |
| 691 | MPK20298-B1_SCFV huCCR8 HV hv_cdr3 | VYYGSGIYYKKRYYYGMDV |
| 692 | MPK20298-B1_SCFV huCCR8 LV lv_cdr1 | EGNNIGSKNVH |
| 693 | MPK20298-B1_SCFV huCCR8 LV lv_cdr2 | RNSNRPS |
| 694 | MPK20298-B1_SCFV huCCR8 LV lv_cdr3 | QAWDSSTVV |
| 695 | MPK20297-E5_SCFV huCCR8 HV hv_cdr1 | NNGMH |
| 696 | MPK20297-E5_SCFV huCCR8 HV hv_cdr2 | VISYDGSNKYYTDSVKG |
| 697 | MPK20297-E5_SCFV huCCR8 HV hv_cdr3 | VYYGSGIYYKKRYYYGMDV |
| 698 | MPK20297-E5_SCFV huCCR8 LV lv_cdr1 | GGNNIGSKNVH |
| 699 | MPK20297-E5_SCFV huCCR8 LV lv_cdr2 | RDSNRPS |
| 700 | MPK20297-E5_SCFV huCCR8 LV lv_cdr3 | QVWDSSSDHVV |
| 701 | MPK20299-A3_SCFV huCCR8 HV hv_cdr1 | NYGMH |
| 702 | MPK20299-A3_SCFV huCCR8 HV hv_cdr2 | VISYDGSNKYYADSVKG |
| 703 | MPK20299-A3_SCFV huCCR8 HV hv_cdr3 | VYYGSGIYYKKRYYYGMDV |
| 704 | MPK20299-A3_SCFV huCCR8 LV lv_cdr1 | GGNNIGSKNVH |
| 705 | MPK20299-A3_SCFV huCCR8 LV lv_cdr2 | RNSNRPS |
| 706 | MPK20299-A3_SCFV huCCR8 LV lv_cdr3 | QAWDSSNVV |
| 707 | MPK20297-B4_SCFV huCCR8 HV hv_cdr1 | RNGMH |
| 708 | MPK20297-B4_SCFV huCCR8 HV hv_cdr2 | VISNDGSNKYYADSVKG |
| 709 | MPK20297-B4_SCFV huCCR8 HV hv_cdr3 | VYYGSGIYYKNNYYYGMDV |
| 710 | MPK20297-B4_SCFV huCCR8 LV lv_cdr1 | GGNNIGSQNVH |
| 711 | MPK20297-B4_SCFV huCCR8 LV lv_cdr2 | RDSNRPS |
| 712 | MPK20297-B4_SCFV huCCR8 LV lv_cdr3 | QVWDSSTVV |
| 713 | MPK20298-F6_SCFV huCCR8 HV hv_cdr1 | RNGMH |
| 714 | MPK20298-F6_SCFV huCCR8 HV hv_cdr2 | VISNDGSNKYYADSVKG |
| 715 | MPK20298-F6_SCFV huCCR8 HV hv_cdr3 | VYYGSGIYYKNRYYYGMDV |
| 716 | MPK20298-F6_SCFV huCCR8 LV lv_cdr1 | GGNNIGSKNVH |
| 717 | MPK20298-F6_SCFV huCCR8 LV lv_cdr2 | RDSNRPS |
| 718 | MPK20298-F6_SCFV huCCR8 LV lv_cdr3 | QVWDSSTVV |
| 719 | MPK20299-H3_SCFV huCCR8 HV hv_cdr1 | NYGMH |
| 720 | MPK20299-H3_SCFV huCCR8 HV hv_cdr2 | VISYDGSNKYYADSVKG |
| 721 | MPK20299-H3_SCFV huCCR8 HV hv_cdr3 | VYYGSGIYYKKRYYYGMDV |
| 722 | MPK20299-H3_SCFV huCCR8 LV lv_cdr1 | GGNNIGSKNVH |
| 723 | MPK20299-H3_SCFV huCCR8 LV lv_cdr2 | RNSNRPS |
| 724 | MPK20299-H3_SCFV huCCR8 LV lv_cdr3 | QIWDSSTVV |
| 725 | MPK20298-B9_SCFV huCCR8 HV hv_cdr1 | RNGMH |
| 726 | MPK20298-B9_SCFV huCCR8 HV hv_cdr2 | VISNDGSNKYYADSVKG |
| 727 | MPK20298-B9_SCFV huCCR8 HV hv_cdr3 | VYYGSGIYYKKNYYYGMDV |
| 728 | MPK20298-B9_SCFV huCCR8 LV lv_cdr1 | GGNNIGSKNVH |
| 729 | MPK20298-B9_SCFV huCCR8 LV lv_cdr2 | RDSNRPS |
| 730 | MPK20298-B9_SCFV huCCR8 LV lv_cdr3 | QVWDSSTVV |
| 731 | MPK20299-E2_SCFV huCCR8 HV hv_cdr1 | NNGMH |
| 732 | MPK20299-E2_SCFV huCCR8 HV hv_cdr2 | VISYDGSNKYYTDSVKG |
| 733 | MPK20299-E2_SCFV huCCR8 HV hv_cdr3 | VYYGSGIYYKKRYYYGMDV |
| 734 | MPK20299-E2_SCFV huCCR8 LV lv_cdr1 | EGNNIGSQNVH |
| 735 | MPK20299-E2_SCFV huCCR8 LV lv_cdr2 | RDSNRPS |
| 736 | MPK20299-E2_SCFV huCCR8 LV lv_cdr3 | QVWDGSAVV |
| 737 | MPK20299-D6_SCFV huCCR8 HV hv_cdr1 | SYGMH |
| 738 | MPK20299-D6_SCFV huCCR8 HV hv_cdr2 | VISYDGSNKYYADSVKG |
| 739 | MPK20299-D6_SCFV huCCR8 HV hv_cdr3 | VYYGSGIYYKKRYYYGMDV |
| 740 | MPK20299-D6_SCFV huCCR8 LV lv_cdr1 | EGNNIGSQNVH |
| 741 | MPK20299-D6_SCFV huCCR8 LV lv_cdr2 | RDSNRPS |
| 742 | MPK20299-D6_SCFV huCCR8 LV lv_cdr3 | QVWDGSAVV |
| 743 | MPK20299-A4_SCFV huCCR8 HV hv_cdr1 | NYGFH |
| 744 | MPK20299-A4_SCFV huCCR8 HV hv_cdr2 | VISYDGSNRYYADSVKG |
| 745 | MPK20299-A4_SCFV huCCR8 HV hv_cdr3 | VYYGSGTYYKNRYYYGMDV |
| 746 | MPK20299-A4_SCFV huCCR8 LV lv_cdr1 | GGHNIGSKGVH |
| 747 | MPK20299-A4_SCFV huCCR8 LV lv_cdr2 | RNSNRPS |
| 748 | MPK20299-A4_SCFV huCCR8 LV lv_cdr3 | QAWDSGTVV |
| 749 | MPK20300-G5_SCFV huCCR8 HV hv_cdr1 | NYGFH |
| 750 | MPK20300-G5_SCFV huCCR8 HV hv_cdr2 | VISYDGSNRYYADSVKG |
| 751 | MPK20300-G5_SCFV huCCR8 HV hv_cdr3 | VYYGSGTYYKNRYYYGMDV |
| 752 | MPK20300-G5_SCFV huCCR8 LV lv_cdr1 | GANNIGSKNVH |
| 753 | MPK20300-G5_SCFV huCCR8 LV lv_cdr2 | RDFNRPS |
| 754 | MPK20300-G5_SCFV huCCR8 LV lv_cdr3 | QVWDSSTGNVV |
| 755 | MPK20299-C3_SCFV huCCR8 HV hv_cdr1 | NYGFH |
| 756 | MPK20299-C3_SCFV huCCR8 HV hv_cdr2 | VISYDGSNKYYADSVKG |
| 757 | MPK20299-C3_SCFV huCCR8 HV hv_cdr3 | VYYGSGSYYKNRYYYGMDV |
| 758 | MPK20299-C3_SCFV huCCR8 LV lv_cdr1 | GGNNIGSKNVH |
| 759 | MPK20299-C3_SCFV huCCR8 LV lv_cdr2 | RDSNRPS |
| 760 | MPK20299-C3_SCFV huCCR8 LV lv_cdr3 | QVWDSSTVV |
| 761 | MPK20299-B7_SCFV huCCR8 HV hv_cdr1 | NYGMH |
| 762 | MPK20299-B7_SCFV huCCR8 HV hv_cdr2 | VISYDGSNKYYADSVKG |
| 763 | MPK20299-B7_SCFV huCCR8 HV hv_cdr3 | VYYGSGIYYKKRYYYGMDV |
| 764 | MPK20299-B7_SCFV huCCR8 LV lv_cdr1 | GGNNIGSKNVH |
| 765 | MPK20299-B7_SCFV huCCR8 LV lv_cdr2 | RDSNRPS |
| 766 | MPK20299-B7_SCFV huCCR8 LV lv_cdr3 | QVWDSSSAHVI |
| 767 | MPK20299-A5_SCFV huCCR8 HV hv_cdr1 | GYGMH |
| 768 | MPK20299-A5_SCFV huCCR8 HV hv_cdr2 | VISYDGSNKYYADSVKG |
| 769 | MPK20299-A5_SCFV huCCR8 HV hv_cdr3 | VYYGSGIYYKNRYYYGMDV |
| 770 | MPK20299-A5_SCFV huCCR8 LV lv_cdr1 | GGNNLGSKNVH |
| 771 | MPK20299-A5_SCFV huCCR8 LV lv_cdr2 | RNSNRPS |
| 772 | MPK20299-A5_SCFV huCCR8 LV lv_cdr3 | QVWDSSTVV |
| 773 | MPK20299-D1_SCFV huCCR8 HV hv_cdr1 | NNGMH |
| 774 | MPK20299-D1_SCFV huCCR8 HV hv_cdr2 | VISYDGSNKYYADSVKG |
| 775 | MPK20299-D1_SCFV huCCR8 HV hv_cdr3 | VYYGSGIYYKNRYYYGMDV |
| 776 | MPK20299-D1_SCFV huCCR8 LV lv_cdr1 | GGNRIGSKNVH |
| 777 | MPK20299-D1_SCFV huCCR8 LV lv_cdr2 | RDSNRPS |
| 778 | MPK20299-D1_SCFV huCCR8 LV lv_cdr3 | QVWDSSTVV |
| 779 | MPK20299-C5_SCFV huCCR8 HV hv_cdr1 | NYGFH |
| 780 | MPK20299-C5_SCFV huCCR8 HV hv_cdr2 | VISYDGSNRYYADSVKG |
| 781 | MPK20299-C5_SCFV huCCR8 HV hv_cdr3 | VYYGSGTYYKNRYYYGMDV |
| 782 | MPK20299-C5_SCFV huCCR8 LV lv_cdr1 | GGHNIGSKGVH |
| 783 | MPK20299-C5_SCFV huCCR8 LV lv_cdr2 | RNSNRPS |
| 784 | MPK20299-C5_SCFV huCCR8 LV lv_cdr3 | QVWDSSTVV |
| 785 | MPK20299-B5_SCFV huCCR8 HV hv_cdr1 | NYGMH |
| 786 | MPK20299-B5_SCFV huCCR8 HV hv_cdr2 | VISYDGSNKYYADSVKG |
| 787 | MPK20299-B5_SCFV huCCR8 HV hv_cdr3 | VYYGSGIYYKNRYYYGMDV |
| 788 | MPK20299-B5_SCFV huCCR8 LV lv_cdr1 | GGHNIGSKGVH |
| 789 | MPK20299-B5_SCFV huCCR8 LV lv_cdr2 | RNSNRPS |
| 790 | MPK20299-B5_SCFV huCCR8 LV lv_cdr3 | QVWDSSTVV |
| 791 | MPK20299-G9_SCFV huCCR8 HV hv_cdr1 | NNGMH |
| 792 | MPK20299-G9_SCFV huCCR8 HV hv_cdr2 | VISNDGSNKYYADSVRG |
| 793 | MPK20299-G9_SCFV huCCR8 HV hv_cdr3 | VYYGSGIYYKNRYYYGMDV |
| 794 | MPK20299-G9_SCFV huCCR8 LV lv_cdr1 | GGNNIGSKNVH |
| 795 | MPK20299-G9_SCFV huCCR8 LV lv_cdr2 | RNSNRPS |
| 796 | MPK20299-G9_SCFV huCCR8 LV lv_cdr3 | QVWDSSTVV |
| 797 | MPK20299-G5_SCFV huCCR8 HV hv_cdr1 | NNGMH |
| 798 | MPK20299-G5_SCFV huCCR8 HV hv_cdr2 | VISNDGSNKYYADSVRG |
| 799 | MPK20299-G5_SCFV huCCR8 HV hv_cdr3 | VYYGSGIYYKNRYYYGMDV |
| 800 | MPK20299-G5_SCFV huCCR8 LV lv_cdr1 | EGNNIGSKNVH |
| 801 | MPK20299-G5_SCFV huCCR8 LV lv_cdr2 | RDSNRPS |
| 802 | MPK20299-G5_SCFV huCCR8 LV lv_cdr3 | QVWDSSAVV |
| 803 | MPK20298-C10_SCFV huCCR8 HV | SSGMH |
| | hv_cdr1 | |
| 804 | MPK20298-C10_SCFV huCCR8 HV | VISNDGSNKYYADSVRG |
| | hv_cdr2 | |
| 805 | MPK20298-C10_SCFV huCCR8 HV | VYYGSGIYYKNNYYYGMDV |
| | hv_cdr3 | |
| 806 | MPK20298-C10_SCFV huCCR8 LV lv_cdr1 | GGNNIGSKNVH |
| 807 | MPK20298-C10_SCFV huCCR8 LV lv_cdr2 | RNSNRPS |
| 808 | MPK20298-C10_SCFV huCCR8 LV lv_cdr3 | QAWDSSTVV |
| 809 | MPK20298-B5_SCFV huCCR8 HV hv_cdr1 | NYGMH |
| 810 | MPK20298-B5_SCFV huCCR8 HV hv_cdr2 | VISYDGSNKYYADSVKG |
| 811 | MPK20298-B5_SCFV huCCR8 HV hv_cdr3 | VYYGSGIYYKKRYYYGMDV |
| 812 | MPK20298-B5_SCFV huCCR8 LV lv_cdr1 | GGNNIGSQNVH |
| 813 | MPK20298-B5_SCFV huCCR8 LV lv_cdr2 | RDSNRPS |
| 814 | MPK20298-B5_SCFV huCCR8 LV lv_cdr3 | QVWDSSAVV |
| 815 | MPK20299-F2_SCFV huCCR8 HV hv_cdr1 | SSGMH |
| 816 | MPK20299-F2_SCFV huCCR8 HV hv_cdr2 | VISNDGSNKYYADSVRG |
| 817 | MPK20299-F2_SCFV huCCR8 HV hv_cdr3 | VYYGSGIYYKNRYYYGMDV |
| 818 | MPK20299-F2_SCFV huCCR8 LV lv_cdr1 | GGNNIGSKNVH |
| 819 | MPK20299-F2_SCFV huCCR8 LV lv_cdr2 | RDSNRPS |
| 820 | MPK20299-F2_SCFV huCCR8 LV lv_cdr3 | QAWDSGTVV |
| 821 | MPK20298-D4_SCFV huCCR8 HV hv_cdr1 | NYGMH |
| 822 | MPK20298-D4_SCFV huCCR8 HV hv_cdr2 | VISYDGSNKYYADSVKG |
| 823 | MPK20298-D4_SCFV huCCR8 HV hv_cdr3 | VYYGSGIYYKKRYYYGMDV |
| 824 | MPK20298-D4_SCFV huCCR8 LV lv_cdr1 | GGNNIGGKNVH |
| 825 | MPK20298-D4_SCFV huCCR8 LV lv_cdr2 | RDSNRPS |
| 826 | MPK20298-D4_SCFV huCCR8 LV lv_cdr3 | QVWDSSTVV |
| 827 | MPK20297-F5_SCFV huCCR8 HV hv_cdr1 | RNGMH |
| 828 | MPK20297-F5_SCFV huCCR8 HV hv_cdr2 | VISNDGSNKYYADSVKG |
| 829 | MPK20297-F5_SCFV huCCR8 HV hv_cdr3 | VYYGSGIYYKNNYYYGMDV |
| 830 | MPK20297-F5_SCFV huCCR8 LV lv_cdr1 | GGNNIGSKNVH |
| 831 | MPK20297-F5_SCFV huCCR8 LV lv_cdr2 | RNSNRPS |
| 832 | MPK20297-F5_SCFV huCCR8 LV lv_cdr3 | QVWDSSTVV |
| 833 | MPK20299-D9_SCFV huCCR8 HV hv_cdr1 | RNGMH |
| 834 | MPK20299-D9_SCFV huCCR8 HV hv_cdr2 | VISNDGSNKYYADSVKG |
| 835 | MPK20299-D9_SCFV huCCR8 HV hv_cdr3 | VYYGSGIYYKNNYYYGMDV |
| 836 | MPK20299-D9_SCFV huCCR8 LV lv_cdr1 | GGNNIESKNVH |
| 837 | MPK20299-D9_SCFV huCCR8 LV lv_cdr2 | RDSNRPS |
| 838 | MPK20299-D9_SCFV huCCR8 LV lv_cdr3 | QVWDSSTVV |
| 839 | huCCR8_32360_huIgG1z | NARMG |
| | mAb(LC:K38R)_HC huCCR8 HV hv_cdr1 | |
| 840 | huCCR8_32360_huIgG1z | RIKSKTEGGTRDYAAPVKG |
| | mAb(LC:K38R)_HC huCCR8 HV hv_cdr2 | |
| 841 | huCCR8_32360_huIgG1z | YSGV |
| | mAb(LC:K38R)_HC huCCR8 HV hv_cdr3 | |
| 842 | huCCR8_32360_huIgG1z | KSSQSVLYSSNNRNYLA |
| | mAb(LC:K38R)_LC huCCR8 LV lv_cdr1 | |
| 843 | huCCR8_32360_huIgG1z | WASTRES |
| | mAb(LC:K38R)_LC huCCR8 LV lv_cdr2 | |
| 844 | huCCR8_32360_huIgG1z | QQYYSIPIT |
| | mAb(LC:K38R)_LC huCCR8 LV lv_cdr3 | |
| 845 | anti- | NYGFH |
| | huCCR8_44379(VH:D72S, VL:N67A_S68A_ | |
| | M99G_W109F_S111A)_huIgG1z (mAb)_HC | |
| | huCCR8 HV hv_cdr1 | |
| 846 | anti- | VISYDGSNRYYASSVKG |
| | huCCR8_44379(VH:D72S, VL:N67A_S68A_ | |
| | M99G_W109F_S111A)_huIgG1z (mAb)_HC | |
| | huCCR8 HV hv_cdr2 | |
| 847 | anti- | VYYGSGTYYKNRYYYGMDV |
| | huCCR8_44379(VH:D72S, VL:N67A_S68A_ | |
| | M99G_W109F_S111A)_huIgG1z (mAb)_HC | |
| | huCCR8 HV hv_cdr3 | |
| 848 | anti- | GGHNIGSKGVH |
| | huCCR8_44379(VH:D72S, VL:N67A_S68A_ | |
| | M99G_W109F_S111A)_huIgG1z (mAb)_LC | |
| | huCCR8 LV lv_cdr1 | |
| 849 | anti- | RAANRPS |
| | huCCR8_44379(VH:D72S, VL:N67A_S68A_ | |
| | M99G_W109F_S111A)_huIgG1z (mAb)_LC | |
| | huCCR8 LV lv_cdr2 | |
| 850 | anti- | QAFDAGTVV |
| | huCCR8_44379(VH:D72S, VL:N67A_S68A_ | |
| | M99G_W109F_S111A)_huIgG1z (mAb)_LC | |
| | huCCR8 LV lv_cdr3 | |
| 851 | anti- | NYGFH |
| | huCCR8_44379(VH:D61A_D72A, VL:N67Q_ | |
| | M99E_W109F_S111A)_huIgG1z | |
| | (mAb)_HC huCCR8 HV hv_cdr1 | |
| 852 | anti- | VISYAGSNRYYAASVKG |
| | huCCR8_44379(VH:D61A_D72A, VL:N67Q_ | |
| | M99E_W109F_S111A)_huIgG1z | |
| | (mAb)_HC huCCR8 HV hv_cdr2 | |
| 853 | anti- | VYYGSGTYYKNRYYYGMDV |
| | huCCR8_44379(VH:D61A_D72A, VL:N67Q_ | |
| | M99E_W109F_S111A)_huIgG1z | |
| | (mAb)_HC huCCR8 HV hv_cdr3 | |
| 854 | anti- | GGHNIGSKGVH |
| | huCCR8_44379(VH:D61A_D72A, VL:N67Q_ | |
| | M99E_W109F_S111A)_huIgG1z | |
| | (mAb)_LC huCCR8 LV lv_cdr1 | |
| 855 | anti- | RQSNRPS |
| | huCCR8_44379(VH:D61A_D72A, VL:N67Q_ | |
| | M99E_W109F_S111A)_huIgG1z | |
| | (mAb)_LC huCCR8 LV lv_cdr2 | |
| 856 | anti- | QAFDAGTVV |
| | huCCR8_44379(VH:D61A_D72A, VL:N67Q_ | |
| | M99E_W109F_S111A)_huIgG1z | |
| | (mAb)_LC huCCR8 LV lv_cdr3 | |
| 857 | anti- | NYGFH |
| | huCCR8_44379(VH:D61S, VL:N67Q_M99G_ | |
| | W109F_S111A)_huIgG1z (mAb)_HC | |
| | huCCR8 HV hv_cdr1 | |
| 858 | anti- | VISYSGSNRYYADSVKG |
| | huCCR8_44379(VH:D61S, VL:N67Q_M99G_ | |
| | W109F_S111A)_huIgG1z (mAb)_HC | |
| | huCCR8 HV hv_cdr2 | |
| 859 | anti- | VYYGSGTYYKNRYYYGMDV |
| | huCCR8_44379(VH:D61S, VL:N67Q_M99G_ | |
| | W109F_S111A)_huIgG1z (mAb)_HC | |
| | huCCR8 HV hv_cdr3 | |
| 860 | anti- | GGHNIGSKGVH |
| | huCCR8_44379(VH:D61S, VL:N67Q_M99G_ | |
| | W109F_S111A)_huIgG1z (mAb)_LC | |
| | huCCR8 LV lv_cdr1 | |
| 861 | anti- | RQSNRPS |
| | huCCR8_44379(VH:D61S, VL:N67Q_M99G_ | |
| | W109F_S111A)_huIgG1z (mAb)_LC | |
| | huCCR8 LV lv_cdr2 | |
| 862 | anti- | QAFDAGTVV |
| | huCCR8_44379(VH:D61S, VL:N67Q_M99G_ | |
| | W109F_S111A)_huIgG1z (mAb)_LC | |
| | huCCR8 LV lv_cdr3 | |
| 863 | Hu anti-huCCR8 LIBC315615-1 HuIgG1z | GGHNIGSKGVH |
| | mAb_LC huCCR8 LV lv_cdr1 | |
| 864 | Hu anti-huCCR8 LIBC315615-1 HuIgG1z | RNSNRPS |
| | mAb_LC huCCR8 LV lv_cdr2 | |
| 865 | Hu anti-huCCR8 LIBC315615-1 HuIgG1z | QVWDISTVV |
| | mAb_LC huCCR8 LV lv_cdr3 | |
| 866 | Hu anti-huCCR8 LIBC315615-1 HuIgG1z | NCGMH |
| | mAb_HC huCCR8 HV hv_cdr1 | |
| 867 | Hu anti-huCCR8 LIBC315615-1 HuIgG1z | VISYDGGNKYHADSVKG |
| | mAb_HC huCCR8 HV hv_cdr2 | |
| 868 | Hu anti-huCCR8 LIBC315615-1 HuIgG1z | VYYGSGIYYKNRYYYGMDV |
| | mAb_HC huCCR8 HV hv_cdr3 | |
| 869 | Hu anti-huCCR8 LIBC317152-1 HuIgG1z | GGHNIGSKGVH |
| | mAb_LC huCCR8 LV lv_cdr1 | |
| 870 | Hu anti-huCCR8 LIBC317152-1 HuIgG1z | RNSNRPS |
| | mAb_LC huCCR8 LV lv_cdr2 | |
| 871 | Hu anti-huCCR8 LIBC317152-1 HuIgG1z | QVWDSSTVV |
| | mAb_LC huCCR8 LV lv_cdr3 | |
| 872 | Hu anti-huCCR8 LIBC317152-1 HuIgG1z | NCGMH |
| | mAb_HC huCCR8 HV hv_cdr1 | |
| 873 | Hu anti-huCCR8 LIBC317152-1 HuIgG1z | VISYDGGNKYYADSVKG |
| | mAb_HC huCCR8 HV hv_cdr2 | |
| 874 | Hu anti-huCCR8 LIBC317152-1 HuIgG1z | VYYGSGIYYKNRYYYGMDV |
| | mAb_HC huCCR8 HV hv_cdr3 | |
| 875 | Hu anti-huCCR8 LIBC317471-1 HuIgG1z | GGNNIGSKNVH |
| | mAb_LC huCCR8 LV lv_cdr1 | |
| 876 | Hu anti-huCCR8 LIBC317471-1 HuIgG1z | RDSNRPS |
| | mAb_LC huCCR8 LV lv_cdr2 | |
| 877 | Hu anti-huCCR8 LIBC317471-1 HuIgG1z | QVWDSNTVV |
| | mAb_LC huCCR8 LV lv_cdr3 | |
| 878 | Hu anti-huCCR8 LIBC317471-1 HuIgG1z | NNGMH |
| | mAb_HC huCCR8 HV hv_cdr1 | |
| 879 | Hu anti-huCCR8 LIBC317471-1 HuIgG1z | VISNDGSNKYYADSVRG |
| | mAb_HC huCCR8 HV hv_cdr2 | |
| 880 | Hu anti-huCCR8 LIBC317471-1 HuIgG1z | VYYGSGIYYKNNYYYGMDV |
| | mAb_HC huCCR8 HV hv_cdr3 | |
| 881 | Hu anti-huCCR8 LIBC317977-1 HuIgG1z | GGNNIGSKNVH |
| | mAb_LC huCCR8 LV lv_cdr1 | |
| 882 | Hu anti-huCCR8 LIBC317977-1 HuIgG1z | RNSNRPS |
| | mAb_LC huCCR8 LV lv_cdr2 | |
| 883 | Hu anti-huCCR8 LIBC317977-1 HuIgG1z | QVWDSSTVV |
| | mAb_LC huCCR8 LV lv_cdr3 | |
| 884 | Hu anti-huCCR8 LIBC317977-1 HuIgG1z | TYGMH |
| | mAb_HC huCCR8 HV hv_cdr1 | |
| 885 | Hu anti-huCCR8 LIBC317977-1 HuIgG1z | VISYDGSNKYYADSVKG |
| | mAb_HC huCCR8 HV hv_cdr2 | |
| 886 | Hu anti-huCCR8 LIBC317977-1 HuIgG1z | VYYGSGSYYKKNYYYGMDV |
| | mAb_HC huCCR8 HV hv_cdr3 | |
| 887 | Hu anti-huCCR8 LIBC318774-1 HuIgG1z | GGNNIGGKNVH |
| | mAb_LC huCCR8 LV lv_cdr1 | |
| 888 | Hu anti-huCCR8 LIBC318774-1 HuIgG1z | RDSNRPS |
| | mAb_LC huCCR8 LV lv_cdr2 | |
| 889 | Hu anti-huCCR8 LIBC318774-1 HuIgG1z | QVWDSSTVV |
| | mAb_LC huCCR8 LV lv_cdr3 | |
| 890 | Hu anti-huCCR8 LIBC318774-1 HuIgG1z | SYGFH |
| | mAb_HC huCCR8 HV hv_cdr1 | |
| 891 | Hu anti-huCCR8 LIBC318774-1 HuIgG1z | VISYDGSNKYYADSVKG |
| | mAb_HC huCCR8 HV hv_cdr2 | |
| 892 | Hu anti-huCCR8 LIBC318774-1 HuIgG1z | VYYGSGTYYKNRYYYGMDV |
| | mAb_HC huCCR8 HV hv_cdr3 | |
| 893 | Hu anti-huCCR8 LIBC319840-1 HuIgG1z | GGNNIGSKNVH |
| | mAh_LC huCCR8 LV lv_cdr1 | |
| 894 | Hu anti-huCCR8 LIBC319840-1 HuIgG1z | RDSNRPS |
| | mAb_LC huCCR8 LV lv_cdr2 | |
| 895 | Hu anti-huCCR8 LIBC319840-1 HuIgG1z | QVWDSSTVV |
| | mAb_LC huCCR8 LV lv_cdr3 | |
| 896 | Hu anti-huCCR8 LIBC319840-1 HuIgG1z | NNGMH |
| | mAb_HC huCCR8 HV hv_cdr1 | |
| 897 | Hu anti-huCCR8 LIBC319840-1 HuIgG1z | VISNDGSNKYYPDSVKG |
| | mAb_HC huCCR8 HV hv_cdr2 | |
| 898 | Hu anti-huCCR8 LIBC319840-1 HuIgG1z | VYYGSGNYYKNNYYYGMDV |
| | mAb_HC huCCR8 HV hv_cdr3 | |
| 899 | Hu anti-huCCR8 LIBC320212-1 HuIgG1z | EGNNIGSQNVH |
| | mAb_LC huCCR8 LV lv_cdr1 | |
| 900 | Hu anti-huCCR8 LIBC320212-1 HuIgG1z | RDSNRPS |
| | mAb_LC huCCR8 LV lv_cdr2 | |
| 901 | Hu anti-huCCR8 LIBC320212-1 HuIgG1z | QVWDGSAVV |
| | mAb_LC huCCR8 LV lv_cdr3 | |
| 902 | Hu anti-huCCR8 LIBC320212-1 HuIgG1z | SSGMH |
| | mAb_HC huCCR8 HV hv_cdr1 | |
| 903 | Hu anti-huCCR8 LIBC320212-1 HuIgG1z | VISHDGSNKYYADSVKG |
| | mAb_HC huCCR8 HV hv_cdr2 | |
| 904 | Hu anti-huCCR8 LIBC320212-1 HuIgG1z | VYYGSGIYYKNRYYYGMDV |
| | mAb_HC huCCR8 HV hv_cdr3 | |
| 905 | Hu anti-huCCR8 LIBC320384-1 HuIgG1z | GGHNIGSKGVH |
| | mAb_LC huCCR8 LV lv_cdr1 | |
| 906 | Hu anti-huCCR8 LIBC320384-1 HuIgG1z | RNSNRPS |
| | mAb_LC huCCR8 LV lv_cdr2 | |
| 907 | Hu anti-huCCR8 LIBC320384-1 HuIgG1z | QVWDSSTVV |
| | mAb_LC huCCR8 LV lv_cdr3 | |
| 908 | Hu anti-huCCR8 LIBC320384-1 HuIgG1z | DCGMH |
| | mAb_HC huCCR8 HV hv_cdr1 | |
| 909 | Hu anti-huCCR8 LIBC320384-1 HuIgG1z | VISYDGGNKYYADSVKG |
| | mAb_HC huCCR8 HV hv_cdr2 | |
| 910 | Hu anti-huCCR8 LIBC320384-1 HuIgG1z | VYYGSGIYYKNRYYYGMDV |
| | mAb_HC huCCR8 HV hv_cdr3 | |
| 911 | Hu anti-huCCR8 LIBC320689-1 HuIgG1z | GGNNIGSKNVH |
| | mAb_LC huCCR8 LV lv_cdr1 | |
| 912 | Hu anti-huCCR8 LIBC320689-1 HuIgG1z | RSSNRPS |
| | mAb_LC huCCR8 LV lv_cdr2 | |
| 913 | Hu anti-huCCR8 LIBC320689-1 HuIgG1z | QIWDSSTVV |
| | mAb_LC huCCR8 LV lv_cdr3 | |
| 914 | Hu anti-huCCR8 LIBC320689-1 HuIgG1z | SYGMH |
| | mAb_HC huCCR8 HV hv_cdr1 | |
| 915 | Hu anti-huCCR8 LIBC320689-1 HuIgG1z | VISFDGNNKYYADSVKG |
| | mAb_HC huCCR8 HV hv_cdr2 | |
| 916 | Hu anti-huCCR8 LIBC320689-1 HuIgG1z | VYYGSGSYYKNRYYYGMDV |
| | mAb_HC huCCR8 HV hv_cdr3 | |
| 917 | Hu anti-huCCR8 LIBC321408-1 HuIgG1z | GGNNIGSKNVH |
| | mAb_LC huCCR8 LV lv_cdr1 | |
| 918 | Hu anti-huCCR8 LIBC321408-1 HuIgG1z | RDSNRPS |
| | mAb_LC huCCR8 LV lv_cdr2 | |
| 919 | Hu anti-huCCR8 LIBC321408-1 HuIgG1z | QVWDSSTVV |
| | mAb_LC huCCR8 LV lv_cdr3 | |
| 920 | Hu anti-huCCR8 LIBC321408-1 HuIgG1z | SNGMH |
| | mAb_HC huCCR8 HV hv_cdr1 | |
| 921 | Hu anti-huCCR8 LIBC321408-1 HuIgG1z | VISNDGSNKYYGDSVKG |
| | mAb_HC huCCR8 HV hv_cdr2 | |
| 922 | Hu anti-huCCR8 LIBC321408-1 HuIgG1z | VYYGSGIYYRNNYYYGMDV |
| | mAb_HC huCCR8 HV hv_cdr3 | |
| 923 | Hu anti-huCCR8 LIBC321824-1 HuIgG1z | GGNNIGSKNVH |
| | mAb_LC huCCR8 LV lv_cdr1 | |
| 924 | Hu anti-huCCR8 LIBC321824-1 HuIgG1z | RNTNRPS |
| | mAb_LC huCCR8 LV lv_cdr2 | |
| 925 | Hu anti-huCCR8 LIBC321824-1 HuIgG1z | QVWDSSTVV |
| | mAb_LC huCCR8 LV lv_cdr3 | |
| 926 | Hu anti-huCCR8 LIBC321824-1 HuIgG1z | GYGMH |
| | mAb_HC huCCR8 HV hv_cdr1 | |
| 927 | Hu anti-huCCR8 LIBC321824-1 HuIgG1z | VISYDGSNKYYADSVKG |
| | mAb_HC huCCR8 HV hv_cdr2 | |
| 928 | Hu anti-huCCR8 LIBC321824-1 HuIgG1z | VYYGSGIYYKNRYYYGMDV |
| | mAb_HC huCCR8 HV hv_cdr3 | |
| 929 | Hu anti-huCCR8 LIBC321845-1 HuIgG1z | GGNNIGSKNVH |
| | mAb_LC huCCR8 LV lv_cdr1 | |
| 930 | Hu anti-huCCR8 LIBC321845-1 HuIgG1z | RNTNRPS |
| | mAb_LC huCCR8 LV lv_cdr2 | |
| 931 | Hu anti-huCCR8 LIBC321845-1 HuIgG1z | QVWDSSTVV |
| | mAb_LC huCCR8 LV lv_cdr3 | |
| 932 | Hu anti-huCCR8 LIBC321845-1 HuIgG1z | GYGMH |
| | mAb_HC huCCR8 HV hv_cdr1 | |
| 933 | Hu anti-huCCR8 LIBC321845-1 HuIgG1z | VISYDGSNKYYADSVKG |
| | mAb_HC huCCR8 HV hv_cdr2 | |
| 934 | Hu anti-huCCR8 LIBC321845-1 HuIgG1z | VYYGSGIYYKNRYYYGMDV |
| | mAb_HC huCCR8 HV hv_cdr3 | |
| 935 | Hu anti-huCCR8 LIBC322176-1 HuIgG1z | GGNNIGDKNVH |
| | mAb_LC huCCR8 LV lv_cdr1 | |
| 936 | Hu anti-huCCR8 LIBC322176-1 HuIgG1z | RNNVRPS |
| | mAb_LC huCCR8 LV lv_cdr2 | |
| 937 | Hu anti-huCCR8 LIBC322176-1 HuIgG1z | QVWDSSTVV |
| | mAb_LC huCCR8 LV lv_cdr3 | |
| 938 | Hu anti-huCCR8 LIBC322176-1 HuIgG1z | NFGMH |
| | mAb_HC huCCR8 HV hv_cdr1 | |
| 939 | Hu anti-huCCR8 LIBC322176-1 HuIgG1z | VISYDGGNKYYADSVKG |
| | mAb_HC huCCR8 HV hv_cdr2 | |
| 940 | Hu anti-huCCR8 LIBC322176-1 HuIgG1z | VYYGSGSYYKKRYYYGMDV |
| | mAb_HC huCCR8 HV hv_cdr3 | |
| 941 | Hu anti-huCCR8 LIBC323412-1 HuIgG1z | GGNNIGSKNVH |
| | mAb_LC huCCR8 LV lv_cdr1 | |
| 942 | Hu anti-huCCR8 LIBC323412-1 HuIgG1z | RDSNRPS |
| | mAb_LC huCCR8 LV lv_cdr2 | |
| 943 | Hu anti-huCCR8 LIBC323412-1 HuIgG1z | QVWDSSTVV |
| | mAb_LC huCCR8 LV lv_cdr3 | |
| 944 | Hu anti-huCCR8 LIBC323412-1 HuIgG1z | SCGMH |
| | mAb_HC huCCR8 HV hv_cdr1 | |
| 945 | Hu anti-huCCR8 LIBC323412-1 HuIgG1z | VISYDGTNKYYADSVKG |
| | mAb_HC huCCR8 HV hv_cdr2 | |
| 946 | Hu anti-huCCR8 LIBC323412-1 HuIgG1z | VYYGSGIYYKKNYYYGMDV |
| | mAb_HC huCCR8 HV hv_cdr3 | |
| 947 | huCCR8_32360_huIgG1z mAb_HC huCCR8 | NARMG |
| | HV hv_cdr1 | |
| 948 | huCCR8_32360_huIgG1z mAb_HC huCCR8 | RIKSKTEGGTRDYAAPVKG |
| | HV hv_cdr2 | |
| 949 | huCCR8_32360_huIgG1z mAb_HC huCCR8 | YSGV |
| | HV hv_cdr3 | |
| 950 | huCCR8_32360_huIgG1z mAb_LC huCCR8 | KSSQSVLYSSNNKNYLA |
| | LV lv_cdr1 | |
| 951 | huCCR8_32360_huIgG1z mAb_LC huCCR8 | WASTRES |
| | LV lv_cdr2 | |
| 952 | huCCR8_32360_huIgG1z mAb_LC huCCR8 | QQYYSIPIT |
| | LV lv_cdr3 | |
| 953 | MPK20298-A4_SCFV HV huCCR8 | QVQLVESGGGVVQPGRSLRLSCVVS |
| | | GFNFSNNGMHWVRQAPGKGLEWVA |
| | | VISNDGSNKYYADSVKGRFTISRDNS |
| | | KNTLYLQMNSLRTEDTAVYYCAKV |
| | | YYGSGIYYKNRNYYGMDVWGQGTT |
| | | VTVSS |
| 954 | MPK20298-A4_SCFV LV huCCR8 | SYELTQPPSVSVALGQTARITCGGNN |
| | | IGSQNVHWYQQKPGQAPVLVIYRDS |
| | | NRPSGIPDRFSGSKSGNTATLTISRAQ |
| | | AGDEADYYCQVWDSSTVVFGGGTK |
| | | LTVL |
| 955 | MPK20299-D2_SCFV HV huCCR8 | QVQLVESGGGVVQPGRSLRLSCAAS |
| | | GFNFSNYGMHWVRQAPGKGLEWVA |
| | | VISYDGSNKYYADSVKGRFTISRDNS |
| | | KNTLYLQMNSLRAEDTAVYFCARVY |
| | | YGSGIYYKKRYYYGMDVWGQGTTV |
| | | TVSS |
| 956 | MPK20299-D2_SCFV LV huCCR8 | SYELTQPPSVSVALGQTARITCGGHN |
| | | IGSKGVHWYQQKPGQAPVLVIYRNS |
| | | NRPSGIPERFSGSNSGNTATLTITRAQ |
| | | AGDEADYYCQVWDSSTVVFGGGTK |
| | | LTVL |
| 957 | MPK20299-F11_SCFV HV huCCR8 | QVQLVESGGGVVQPGRSLRLSCAPS |
| | | GFNFSNYGMHWVRQAPGKGLEWVA |
| | | VISYDGSNKYYADSVKGRFTISRDNS |
| | | KNTLFLQMNSLRAEDTAVYFCARVY |
| | | YGSGSYYKKRYYYGMDVWGQGTT |
| | | VTVSS |
| 958 | MPK20299-F11_SCFV LV huCCR8 | SYELTQPPSVSVALGQTARITCGGNN |
| | | IGSQNVHWYQQKPGQAPVLVIYRDS |
| | | NRPSGIPERFSGSKSGNTATLTISRAQ |
| | | AGDEADYYCQVWDSSTVVFGGGTQ |
| | | LTVL |
| 959 | MPK20298-H6_SCFV HV huCCR8 | QVQLVESGGGVVQPGRSLRLSCAAS |
| | | GFTFSSSGMHWVRQAPGKGLEWVA |
| | | VISYDGTNKYYADSVKGRFTISRDNS |
| | | KNTLYLQMNSLRAEDTAVYYCAKV |
| | | YYGSGIYYKNRYYYGMDVWGQGTT |
| | | VTVSS |
| 960 | MPK20298-H6_SCFV LV huCCR8 | SYELTQPPSVSVALGQTARITCGGHN |
| | | IGSKGVHWYQQKPGQAPVLVIYRNS |
| | | NRPSGIPERFSGSNSGNTATLTISRAQ |
| | | AGDEADYYCQVWDSSTVVFGGGTQ |
| | | LTVL |
| 961 | MPK20297-A4_SCFV HV huCCR8 | QVQLVESGGGVVQPGRSLRLSCAVS |
| | | GFNFSNYGMHWVRQVPGRGLDWVA |
| | | VISNDGSNKYYADSVKGRFTISRDNS |
| | | KNTLYLQMDSLRTEDTAVYYCAKV |
| | | YYGSGIYYKKRYYYGMDVWGQGTT |
| | | VTVSS |
| 962 | MPK20297-A4_SCFV LV huCCR8 | SYELTQPPSVSVALGQTARITCGGHN |
| | | IGSQNVHWYQQKPGQAPVLVIYRDS |
| | | NRPSGIPERFSGSKSGNTATLTISRAQ |
| | | AGDEADYYCQVWDSSTVVFGGGTQ |
| | | LTVL |
| 963 | MPK20299-H8_SCFV HV huCCR8 | QVQLVESGGGVVQPGRSLRLSCAAS |
| | | GFNFSNYGMHWVRQAPGKGLEWVA |
| | | VISYDGSNKYYADSVKGRFTISRDNS |
| | | KNTLYLQMNSLRAEDTAVYFCARVY |
| | | YGSGIYYKKRYYYGMDVWGQGTTV |
| | | TVSS |
| 964 | MPK20299-H8_SCFV LV huCCR8 | SYELTQPPSVSVAPGQTARITCGGNNI |
| | | GSKNVHWYQQKAGQAPVQVIYRNS |
| | | NRPSGIPARFSGSNSGNTATLTISRAQ |
| | | AGDEADYYCQVWDSSTVVFGGGTK |
| | | LTVL |
| 965 | MPK20300-C11_SCFV HV huCCR8 | QVQLVESGGGVVQPGRSLRLSCAAS |
| | | GFTFSSYGMHWVRQAPGKGLEWVA |
| | | VISYDGSNKYYADSVKGRFTISRDNS |
| | | KNTLYLQMNSLRGEDTAVYYCARV |
| | | YYGSGSYYKNRYYYGMDVWGQGT |
| | | TVTVSS |
| 966 | MPK20300-C11_SCFV LV huCCR8 | SYELTQPPSVSVAPGQTARIPCGGNNI |
| | | GSKNVHWYQQKPGQAPVLVIYRDIN |
| | | RPSGIPERFSGSNSGNTATLTISRAQA |
| | | GDEADYYCQVWDSSVVFGGGTKLT |
| | | VL |
| 967 | MPK20298-B1_SCFV HV huCCR8 | QVQLVESGGGVVQPGRSLRLSCAAS |
| | | GFNFSNYGMHWVRQAPGKGLEWVA |
| | | VISYDGSNKYYADSVKGRFTISRDNS |
| | | KNTLYLQMNSLRAEDTAVYFCARVY |
| | | YGSGIYYKKRYYYGMDVWGQGTTV |
| | | TVSS |
| 968 | MPK20298-B1_SCFV LV huCCR8 | SYELTQPPSVSVALGQTARLTCEGNN |
| | | IGSKNVHWYQQKPGQAPVLVIYRNS |
| | | NRPSGIPERFSGSNSGNTATLTISRVQ |
| | | AGDEADYYCQAWDSSTVVFGGGTQ |
| | | LTVL |
| 969 | MPK20297-E5_SCFV HV huCCR8 | QVQLVESGGGLVKPGGSLRLSCAVS |
| | | GFNFSNNGMHWVRQAPGKGLEWVA |
| | | VISYDGSNKYYTDSVKGRFTISRDNS |
| | | KNTLYLQMNSLRTEDTAVYYCAKV |
| | | YYGSGIYYKKRYYYGMDVWGQGTT |
| | | VTVSS |
| 970 | MPK20297-E5_SCFV LV huCCR8 | SYELTQPLSVSEALGQTARITCGGNNI |
| | | GSKNVHWYQQKPGQAPVLVIYRDSN |
| | | RPSGIPERFSGSNSGNAATLTISRVEA |
| | | GDEADYYCQVWDSSSDHVVFGGGT |
| | | QLTVL |
| 971 | MPK20299-A3_SCFV HV huCCR8 | QVQLVESGGGVVQPGRSLRLSCAAS |
| | | GFNFSNYGMHWVRQAPGKGLEWVA |
| | | VISYDGSNKYYADSVKGRFTISRDNS |
| | | KNTLYLQMNSLRAEDTAVYFCARVY |
| | | YGSGIYYKKRYYYGMDVWGQGTTV |
| | | TVSS |
| 972 | MPK20299-A3_SCFV LV huCCR8 | SYELTQPPSVSVAPGQTARITCGGNNI |
| | | GSKNVHWYQQKPGQAPVLVIYRNSN |
| | | RPSGIPERFSGSNSGNTATLTISGTQA |
| | | MDEADYYCQAWDSSNVVFGGGTQL |
| | | TVL |
| 973 | MPK20297-B4_SCFV HV huCCR8 | QVQLVESGGGVVQPGRSLRLSCVVS |
| | | GFNFSRNGMHWVRQVPGRGLDWVA |
| | | VISNDGSNKYYADSVKGRFTISRDNS |
| | | KNTLYLQMNSLRAEDTAVYYCAKV |
| | | YYGSGIYYKNNYYYGMDVWGQGTT |
| | | VTVSS |
| 974 | MPK20297-B4_SCFV LV huCCR8 | SYELTQPLSVSVALGQTARITCGGNN |
| | | IGSQNVHWYQQKPGQAPVLVIYRDS |
| | | NRPSGIPDRFSGSKSGNTATLTISRAQ |
| | | AGDEADYYCQVWDSSTVVFGGGTQ |
| | | LTVL |
| 975 | MPK20298-F6_SCFV HV huCCR8 | QVQLVESGGGVVQPGRSLRLSCVVS |
| | | GFNFSRNGMHWVRQVPGRGLDWVA |
| | | VISNDGSNKYYADSVKGRFTISRDNS |
| | | KNTLYLQMNSLRAEDTAVYYCAKV |
| | | YYGSGIYYKNRYYYGMDVWGQGTT |
| | | VTVSS |
| 976 | MPK20298-F6_SCFV LV huCCR8 | SYELTQPPSVSVAPGQTARITCGGNNI |
| | | GSKNVHWYQQKPGQAPVLVIYRDSN |
| | | RPSGIPERFSGSKSGTTATLTISRAQA |
| | | GDEAEYYCQVWDSSTVVFGGGTELT |
| | | VL |
| 977 | MPK20299-H3_SCFV HV huCCR8 | QVQLVESGGGVVQPGRSLRLSCAAS |
| | | GFNFSNYGMHWVRQAPGKGLEWVA |
| | | VISYDGSNKYYADSVKGRFTISRDNS |
| | | KNTLYLQMNSLRAEDTAVYFCARVY |
| | | YGSGIYYKKRYYYGMDVWGQGTTV |
| | | TVSS |
| 978 | MPK20299-H3_SCFV LV huCCR8 | SYELTQPLSVSVALGQTARITCGGNN |
| | | IGSKNVHWYQQKPGQAPVLAIYRNS |
| | | NRPSGIPERFTGSNSGNTATLTISRAQ |
| | | AGDESDYYCQIWDSSTVVFGGGTKL |
| | | TVL |
| 979 | MPK20298-B9_SCFV HV huCCR8 | QVQLVESGGGVVQPGRSLRLSCAAS |
| | | GFNFSRNGMHWVRQVPGRGLDWVA |
| | | VISNDGSNKYYADSVKGRFTISRDNS |
| | | KNTLYLQMNSLRAEDTAVYYCAKV |
| | | YYGSGIYYKKNYYYGMDVWGQGTT |
| | | VTVSS |
| 980 | MPK20298-B9_SCFV LV huCCR8 | SYELTQPPSVSVALGQTARISCGGNNI |
| | | GSKNVHWYQQKPGQAPVLVIYRDSN |
| | | RPSGIPERFSGSKSGTTATLTISRAQA |
| | | GDEAEYYCQVWDSSTVVFGGGTQLT |
| | | VL |
| 981 | MPK20299-E2_SCFV HV huCCR8 | QVQLVESGGGVVQPGRSLRLSCAVS |
| | | GFNFSNNGMHWVRQAPGKGLEWVA |
| | | VISYDGSNKYYTDSVKGRFTISRDNS |
| | | KNTLYLQMNSLRTEDTAVYYCAKV |
| | | YYGSGIYYKKRYYYGMDVWGQGTT |
| | | VTVSS |
| 982 | MPK20299-E2_SCFV LV huCCR8 | SYELTQPPSVSVALGQTARITCEGNNI |
| | | GSQNVHWYQQKPGQAPVLVMYRDS |
| | | NRPSGIPERFSGSKSGNTATLAISRAQ |
| | | AGDESDYYCQVWDGSAVVFGGGTK |
| | | LTVL |
| 983 | MPK20299-D6_SCFV HV huCCR8 | QVQLVESGGGVVQPGRSLRLSCAAS |
| | | GFTFSSYGMHWVRQAPGKGLEWVA |
| | | VISYDGSNKYYADSVKGRFTISRDNS |
| | | KNTLYLQMNSLRAEDTAVYFCARVY |
| | | YGSGIYYKKRYYYGMDVWGQGTTV |
| | | TVSS |
| 984 | MPK20299-D6_SCFV LV huCCR8 | SYELTQPLSVSVALGQTARITCEGNNI |
| | | GSQNVHWYQQKPGQAPVLVMYRDS |
| | | NRPSGIPERFSGSKSGNTATLAISRAQ |
| | | AGDESDYYCQVWDGSAVVFGGGTQ |
| | | LTVL |
| 985 | MPK20299-A4_SCFV HV huCCR8 | QVQLVESGGGVVQPGRSLRLSCAAS |
| | | GFTFSNYGFHWVRQTPGKGLEWVA |
| | | VISYDGSNRYYADSVKGRFTISRDNS |
| | | KNTLYLQMNSLRGEDTALYYCARV |
| | | YYGSGTYYKNRYYYGMDVWGQGT |
| | | TVTVSS |
| 986 | MPK20299-A4_SCFV LV huCCR8 | SYELTQPPSVSVALGQTARITCGGHN |
| | | IGSKGVHWYQQKPGQAPVLVIYRNS |
| | | NRPSGIPERFSGSNSGNTATLTISGTQ |
| | | AMDEADYYCQAWDSGTVVFGGGTQ |
| | | LTVL |
| 987 | MPK20300-G5_SCFV HV huCCR8 | QVQLVESGGGVVQPGRSLRLSCAAS |
| | | GFTFSNYGFHWVRQTPGKGLEWVA |
| | | VISYDGSNRYYADSVKGRFTISRDNS |
| | | KNTLYLQMNSLRGEDTALYYCARV |
| | | YYGSGTYYKNRYYYGMDVWGQGT |
| | | TVTVSS |
| 988 | MPK20300-G5_SCFV LV huCCR8 | SYELTQPPSVSVALGQTARITCGANN |
| | | IGSKNVHWYQQKPGQPPVLVIYRDF |
| | | NRPSGIPERFSASNSGNTATLTISRGQ |
| | | AGDEADYYCQVWDSSTGNVVFGGG |
| | | TKLTVL |
| 989 | MPK20299-C3_SCFV HV huCCR8 | QVQLVESGGGVVQPGRSLRLSCAAS |
| | | GFIFSNYGFHWVRQTPGKGLEWVAV |
| | | ISYDGSNKYYADSVKGRFTISRDNSK |
| | | NTLYLQMNSLRGEDTAVYYCARVY |
| | | YGSGSYYKNRYYYGMDVWGQGTT |
| | | VTVSS |
| 990 | MPK20299-C3_SCFV LV huCCR8 | SYELTQPPSVSVAPGQTARITCGGNNI |
| | | GSKNVHWYQQKPGQAPVLVIYRDSN |
| | | RPSGIPERFSGSKSGTTATLTISRAQA |
| | | GDEADYYCQVWDSSTVVFGGGTELT |
| | | VL |
| 991 | MPK20299-B7_SCFV HV huCCR8 | QVQLVESGGGVVQPGRSLRLSCAAS |
| | | GFNFSNYGMHWVRQAPGKGLEWVA |
| | | VISYDGSNRYYADSVKGRFTISRDNS |
| | | KNTLYLQMNSLRAEDTAVYFCARVY |
| | | YGSGIYYKKRYYYGMDVWGQGTTV |
| | | TVSS |
| 992 | MPK20299-B7_SCFV LV huCCR8 | SYELTQSSSVSVAPGQTARITCGGNNI |
| | | GSKNVHWYQQKPGQAPVLVIYRDSN |
| | | RPSGIPERFSGSKSGTTATLTISRVEA |
| | | GDEADYYCQVWDSSSAHVIFGGGTK |
| | | LTVL |
| 993 | MPK20299-A5_SCFV HV huCCR8 | QVQLVESGGGVVQPGRSLRLSCGAS |
| | | GFTFSGYGMHWVRQAPGKGLEWVA |
| | | VISYDGSNRYYADSVKGRFTISRDNS |
| | | KNTLYLQMNSLRGEDTAVYYCARV |
| | | YYGSGIYYKNRYYYGMDVWGQGTT |
| | | VTVSS |
| 994 | MPK20299-A5_SCFV LV huCCR8 | SYELTQPPSGSVALGQTARITCGGNN |
| | | LGSKNVHWYQQKPGQAPVLVIYRNS |
| | | NRPSGIPERFSGSNSGNTATLTISRAQ |
| | | AGDEADYYCQVWDSSTVVFGGGTK |
| | | LTVL |
| 995 | MPK20299-D1_SCFV HV huCCR8 | QVQLVESGGGLVKPGGSLRLSCAAS |
| | | GFTFSNNGMHWVRQAPGKGLEWVA |
| | | VISYDGSNKYYADSVKGRFTISRDNS |
| | | KNTLYLQMNSLRAEDTAVYYCAKV |
| | | YYGSGIYYKNRYYYGMDVWGQGTT |
| | | VTVSS |
| 996 | MPK20299-D1_SCFV LV huCCR8 | SYELTQPPSVSVALGQTARITCGGNRI |
| | | GSKNVHWYQQKPGQAPVLVIYRDSN |
| | | RPSGIPERFSGSKSGTTATLTISRAQA |
| | | GDEAEYYCQVWDSSTVVFGGGTKLT |
| | | VL |
| 997 | MPK20299-C5_SCFV HV huCCR8 | QVQLVESGGGVVQPGRSLRLSCAAS |
| | | GFTFSNYGFHWVRQTPGKGLEWVA |
| | | VISYDGSNRYYADSVKGRFTISRDNS |
| | | KNTLYLQMNSLRGEDTALYYCARV |
| | | YYGSGTYYKNRYYYGMDVWGQGT |
| | | TVTVSS |
| 998 | MPK20299-C5_SCFV LV huCCR8 | SYELTQLPSVSVALGQTARITCGGHN |
| | | IGSKGVHWYQQKPGQAPVLVIYRNS |
| | | NRPSGIPERFSGSNSGNTATLTISRAQ |
| | | AGDEADYYCQVWDSSTVVFGGGTE |
| | | LTVL |
| 999 | MPK20299-B5_SCFV HV huCCR8 | QVQLVESGGGVVQPGRSLRLSCAAS |
| | | GFNFSNYGMHWVRQAPGKGLEWVA |
| | | VISYDGSNKYYADSVKGRFTISRDNS |
| | | KNTLYLQMNSLRAEDTAVYFCARVY |
| | | YGSGIYYKNRYYYGMDVWGQGTTV |
| | | TVSS |
| 1000 | MPK20299-B5_SCFV LV huCCR8 | SYELTQPPSVSVALGQTARITCGGHN |
| | | IGSKGVHWYQQKPGQAPVLVIYRNS |
| | | NRPSGIPERFSGSNSGNTATLTISRAQ |
| | | AGDEADYYCQVWDSSTVVFGGGTQ |
| | | LTVL |
| 1001 | MPK20299-G9_SCFV HV huCCR8 | QVQLVESGGDLVQPGRSLRLSCAAS |
| | | GFTFSNNGMHWVRQAPGKGLEWVA |
| | | VISNDGSNKYYADSVRGRFTISRDNS |
| | | KNTLYLQMNSLRAEDTAVYYCAKV |
| | | YYGSGIYYKNRYYYGMDVWGQGTT |
| | | VTVSS |
| 1002 | MPK20299-G9_SCFV LV huCCR8 | SYELTQPLSVSVALGQTARITCGGNN |
| | | IGSKNVHWYQQKPGQAPVLVIYRNS |
| | | NRPSGIPERFSGSNSGNTATLTLSRVQ |
| | | AGDEADYYCQVWDSSTVVFGGGTK |
| | | LTVL |
| 1003 | MPK20299-G5_SCFV HV huCCR8 | QVQLVESGGGVVQPGRSLRLSCAVS |
| | | GFNFSNNGMHWVRQAPGKGLEWVA |
| | | VISNDGSNKYYADSVRGRFTISRDNS |
| | | KNTLYLQMDSLRTEDTAVYYCAKV |
| | | YYGSGIYYKNRYYYGMDVWGQGTT |
| | | VTVSS |
| 1004 | MPK20299-G5_SCFV LV huCCR8 | SYELTQPPSVSVALGQTARLTCEGNN |
| | | IGSKNVHWYQQKPGQAPVLVIYRDS |
| | | NRPSGIPERFSGSKSGNTATLAISRAQ |
| | | AGDESDYYCQVWDSSAVVFGGGTK |
| | | LTVL |
| 1005 | MPK20298-C10_SCFV HV huCCR8 | QVQLVESGGGVVQPGRSLRLSCAAS |
| | | GFTFSSSGMHWVRQAPGKGLEWVA |
| | | VISNDGSNKYYADSVKGRFTISRDNS |
| | | KNTLYLQMNSLRAEDTAVYYCAKV |
| | | YYGSGIYYKNNYYYGMDVWGQGTT |
| | | VTVSS |
| 1006 | MPK20298-C10_SCFV LV huCCR8 | SYELTQPPSVSVALGQTARITCGGNN |
| | | IGSKNVHWYQQKPGQAPVLAIYRNS |
| | | NRPSGIPERFTGSNSGNTATLTISGTQ |
| | | AMDEADYYCQAWDSSTVVFGGGTK |
| | | LTVL |
| 1007 | MPK20298-B5_SCFV HV huCCR8 | QVQLVESGGGVVQPGRSLRLSCAAS |
| | | GFNFSNYGMHWVRQAPGKGLEWVA |
| | | VISYDGSNKYYADSVKGRFTISRDNS |
| | | KNTLYLQMNSLRAEDTAVYFCARVY |
| | | YGSGIYYKKRYYYGMDVWGQGTTV |
| | | TVSS |
| 1008 | MPK20298-B5_SCFV LV huCCR8 | SYELTQPPSVSVALGQTARITCGGNN |
| | | IGSQNVHWYQQKPGQAPVLVIYRDS |
| | | NRPSGIPERFSGSKSGNTATLAISRAQ |
| | | AGDESDYYCQVWDSSAVVFGGGTQ |
| | | LTVL |
| 1009 | MPK20299-F2_SCFV HV huCCR8 | QVQLVESGGGVVQPGRSLRLSCAAS |
| | | GFTLSSSGMHWVRQAPGKGLEWVA |
| | | VISNDGSNKYYADSVKGRFTISRDDS |
| | | KNTLYLQMDSLRTEDTAVYYCAKV |
| | | YYGSGIYYKNRYYYGMDVWGQGTT |
| | | VTVSS |
| 1010 | MPK20299-F2_SCFV LV huCCR8 | SYELTQPPSVSVALGQTARISCGGNNI |
| | | GSKNVHWYQQKPGQAPVLVMYRDS |
| | | NRPSGIPERFSGSNSGNTATLTISGTQ |
| | | AMDEADYYCQAWDSGTVVFGGGTK |
| | | LTVL |
| 1011 | MPK20298-D4_SCFV HV huCCR8 | QVQLVESGGGVVQPGRSLRLSCAAS |
| | | GFNFSNYGMHWVRQAPGKGLEWVA |
| | | VISYDGSNKYYADSVKGRFTISRDNS |
| | | KNTLYLQMNSLRAEDTAVYFCARVY |
| | | YGSGIYYKKRYYYGMDVWGQGTTV |
| | | TVSS |
| 1012 | MPK20298-D4_SCFV LV huCCR8 | SYELTQPPSVSVALGQTARITCGGNN |
| | | IGGKNVHWYQQKPGQAPVLVIYRDS |
| | | NRPSGIPERFSGSKSGNTATLTISRAQ |
| | | AGDESDYYCQVWDSSTVVFGGGTQ |
| | | LTVL |
| 1013 | MPK20297-F5_SCFV HV huCCR8 | QVQLVESGGGVVQPGRSLRLSCVVS |
| | | GFNFSRNGMHWVRQVPGRGLDWVA |
| | | VISNDGSNKYYADSVKGRFTISRDNS |
| | | KNTLYLQMNSLRAEDTAVYYCAKV |
| | | YYGSGIYYKNNYYYGMDVWGQGTT |
| | | VTVSS |
| 1014 | MPK20297-F5_SCFV LV huCCR8 | SYELTQPLSVSVALGQTARITCGGNN |
| | | IGSKNVHWYQQKPGQAPVLVIYRNS |
| | | NRPSGIPERFSGSNSGNTATLTISRAQ |
| | | AGDEADYYCQVWDSSTVVFGGGTK |
| | | LTVL |
| 1015 | MPK20299-D9_SCFV HV huCCR8 | QVQLVESGGGLVKPGGSLRLSCAAS |
| | | GFNFSRNGMHWVRQVPGRGLDWVA |
| | | VISNDGSNKYYADSVKGRFTISRDNS |
| | | KNTLYLQMNSLRAEDTAVYYCAKV |
| | | YYGSGIYYKNNYYYGMDVWGQGTT |
| | | VTVSS |
| 1016 | MPK20299-D9_SCFV LV huCCR8 | SYELTQPPSVSVALGQTARISCGGNNI |
| | | ESKNVHWYQQKPGQAPVLVIYRDSN |
| | | RPSGIPERFSGSKSGTTATLTISRAQA |
| | | GDEAEYYCQVWDSSTVVFGGGTQLT |
| | | VL |
| 1017 | huCCR8_32360_huIgG1z | EVQLVESGGGLVKPGGSLRLSCAAS |
| | mAb(LC:K38R)_HC HV huCCR8 | GFTFSNARMGWVRQAPGKGLEWVG |
| | | RIKSKTEGGTRDYAAPVKGRFTISRD |
| | | DSKNTLYLQMNSLKTEDTAVYYCTS |
| | | YSGVWGQGTMVTVSS |
| 1018 | huCCR8_32360_huIgG1z | DIVMTQSPDSLAVSLGERATINCKSS |
| | mAb(LC:K38R)_LC LV huCCR8 | QSVLYSSNNRNYLAWYHQKPGQSPK |
| | | LLISWASTRESGVPDRFSGSGSGTDFT |
| | | LTINSLQAEDVAVYYCQQYYSIPITFG |
| | | GGTKVEIKR |
| 1019 | anti- | QVQLVESGGGVVQPGRSLRLSCAAS |
| | huCCR8_44379(VH:D72S, VL:N67A_S68A_ | GFTFSNYGFHWVRQTPGKGLEWVA |
| | M99G_W109F_S111A)_huIgG1z (mAb)_HC | VISYDGSNRYYASSVKGRFTISRDNS |
| | HV huCCR8 | KNTLYLQMNSLRGEDTALYYCARV |
| | | YYGSGTYYKNRYYYGMDVWGQGT |
| | | TVTVSS |
| 1020 | anti- | SYELTQPPSVSVALGQTARITCGGHN |
| | huCCR8_44379(VH:D72S, VL:N67A_S68A_ | IGSKGVHWYQQKPGQAPVLVIYRAA |
| | M99G_W109F_S111A)_huIgG1z (mAb)_LC | NRPSGIPERFSGSNSGNTATLTISGTQ |
| | LV huCCR8 | AGDEADYYCQAFDAGTVVFGGGTQ |
| | | LTVLG |
| 1021 | anti- | QVQLVESGGGVVQPGRSLRLSCAAS |
| | huCCR8_44379(VH:D61A_D72A, VL:N67Q_ | GFTFSNYGFHWVRQTPGKGLEWVA |
| | M99E_W109F_S111A)_huIgG1z | VISYAGSNRYYAASVKGRFTISRDNS |
| | (mAb)_HC HV huCCR8 | KNTLYLQMNSLRGEDTALYYCARV |
| | | YYGSGTYYKNRYYYGMDVWGQGT |
| | | TVTVSS |
| 1022 | anti- | SYELTQPPSVSVALGQTARITCGGHN |
| | huCCR8_44379(VH:D61A_D72A, VL:N67Q_ | IGSKGVHWYQQKPGQAPVLVIYRQS |
| | M99E_W109F_S111A)_huIgG1z | NRPSGIPERFSGSNSGNTATLTISGTQ |
| | (mAb)_LC LV huCCR8 | AEDEADYYCQAFDAGTVVFGGGTQ |
| | | LTVLG |
| 1023 | anti- | QVQLVESGGGVVQPGRSLRLSCAAS |
| | huCCR8_44379(VH:D61S, VL:N67Q_M99G_ | GFTFSNYGFHWVRQTPGKGLEWVA |
| | W109F_S111A)_huIgG1z (mAb)_HC HV | VISYSGSNRYYADSVKGRFTISRDNS |
| | huCCR8 | KNTLYLQMNSLRGEDTALYYCARV |
| | | YYGSGTYYKNRYYYGMDVWGQGT |
| | | TVTVSS |
| 1024 | anti- | SYELTQPPSVSVALGQTARITCGGHN |
| | huCCR8_44379(VH:D61S, VL:N67Q_M99G_ | IGSKGVHWYQQKPGQAPVLVIYRQS |
| | W109F_S111A)_huIgG1z (mAb)_LC LV | NRPSGIPERFSGSNSGNTATLTISGTQ |
| | huCCR8 | AGDEADYYCQAFDAGTVVFGGGTQ |
| | | LTVLG |
| 1025 | Hu anti-huCCR8 LIBC315615-1 HuIgG1z | SYELTQPLSVSVALGQTARITCGGHN |
| | mAb_LC LV huCCR8 | IGSKGVHWYQQKPGQAPVLVIYRNS |
| | | NRPSGIPERFSGSNSGNTATLTISRAQ |
| | | AGDEADYYCQVWDISTVVFGGGTEL |
| | | TVLG |
| 1026 | Hu anti-huCCR8 LIBC315615-1 HuIgG1z | QVQLVESGGGVAQPGRSLRLSCAAS |
| | mAb_HC HV huCCR8 | GFNFSNCGMHWVRQAPGKGLEWVA |
| | | VISYDGGNKYHADSVKGRFTISRDDS |
| | | KNTLYLQMDSLRTEDTAVYYCAKV |
| | | YYGSGIYYKNRYYYGMDVWGQGTT |
| | | VTVSS |
| 1027 | Hu anti-huCCR8 LIBC317152-1 HuIgG1z | SYELTQPLSVSVALGQTARITCGGHN |
| | mAb_LC LV huCCR8 | IGSKGVHWYQQKPGQAPVLVIYRNS |
| | | NRPSGIPERFSGSNSGKTATLTISRAQ |
| | | AGDEADYYCQVWDSSTVVFGGGTE |
| | | LTVLG |
| 1028 | Hu anti-huCCR8 LIBC317152-1 HuIgG1z | QVQLVESGGGVAQPGRSLRLSCAAS |
| | mAb_HC HV huCCR8 | GFNFSNCGMHWVRQAPGKGLEWVA |
| | | VISYDGGNKYYADSVKGRFTISRDDS |
| | | KNTLYLQMDSLRTEDTAVYYCAKV |
| | | YYGSGIYYKNRYYYGMDVWGQGTT |
| | | VTVSS |
| 1029 | Hu anti-huCCR8 LIBC317471-1 HuIgG1z | SYELTQPLSVSVALGQTARITCGGNN |
| | mAb_LC LV huCCR8 | IGSKNVHWYQKRPGQAPVLVIYRDS |
| | | NRPSGIPERFSGSKSGNTATLTISRAQ |
| | | AGDEADYYCQVWDSNTVVFGGGTN |
| | | LTVLG |
| 1030 | Hu anti-huCCR8 LIBC317471-1 HuIgG1z | QVQLVESGGGVVQPGRSLRLSCVVS |
| | mAb_HC HV huCCR8 | GFNFSNNGMHWVRQAPGKGLEWVA |
| | | VISNDGSNKYYADSVRGRFTISRDNS |
| | | KNTLYLQMNSLRAEDTAVYSCAKV |
| | | YYGSGIYYKNNYYYGMDVWGQGTT |
| | | VTVSS |
| 1031 | Hu anti-huCCR8 LIBC317977-1 HuIgG1z | SYELTQPLSVSVALGQTARITCGGNN |
| | mAb_LC LV huCCR8 | IGSKNVHWYQQKAGQAPVQVIYRNS |
| | | NRPSGIPERFSGSNSGNTATLTISRAQ |
| | | AGDEADYYCQVWDSSTVVFGGGTK |
| | | LTVLG |
| 1032 | Hu anti-huCCR8 LIBC317977-1 HuIgG1z | QVQLVESGGGVVQPGRSLRLSCAAS |
| | mAb_HC HV huCCR8 | GFNFNTYGMHWVRQAPGKGLEWVA |
| | | VISYDGSNKYYADSVKGRFTISRDNS |
| | | KSTLYLQMNSLRAEDTAVYYCARVY |
| | | YGSGSYYKKNYYYGMDVWGQGTT |
| | | VTVSS |
| 1033 | Hu anti-huCCR8 LIBC318774-1 HuIgG1z | SYELTQPLSVSVALGQTARITCGGNN |
| | mAb_LC LV huCCR8 | IGGKNVHWYQQKPGQAPVLVIYRDS |
| | | NRPSGIPERFSGSKSGNTATLTISRAQ |
| | | AGDESDYYCQVWDSSTVVFGGGTTL |
| | | TVLG |
| 1034 | Hu anti-huCCR8 LIBC318774-1 HuIgG1z | QVQVVESGGGVVQPGRSLRLSCAAS |
| | mAb_HC HV huCCR8 | GFTLSSYGFHWVRQTPGKGLEWVAV |
| | | ISYDGSNKYYADSVKGRFTISRDNSK |
| | | NTLYLQMNSLRGEDTAVYYCARVY |
| | | YGSGTYYKNRYYYGMDVWGQGTT |
| | | VTVSS |
| 1035 | Hu anti-huCCR8 LIBC319840-1 HuIgG1z | SYELTQPLSVSEALGQTARITCGGNNI |
| | mAb_LC LV huCCR8 | GSKNVHWYQQKPGQAPVLVIYRDSN |
| | | RPSGIPERFSGSKSGNTATLTISRAQA |
| | | GDEADYYCQVWDSSTVVFGGGTKV |
| | | TVLG |
| 1036 | Hu anti-huCCR8 LIBC319840-1 HuIgG1z | QVQLVESGGGVVQPGRSLRLSCVVS |
| | mAb_HC HV huCCR8 | GFNFINNGMHWVRQAPGKGLDWVA |
| | | VISNDGSNKYYPDSVKGRFTISRDNS |
| | | KNTLYLQMNSLRAEDSAVYYCAKV |
| | | YYGSGNYYKNNYYYGMDVWGQGT |
| | | TVTVSS |
| 1037 | Hu anti-huCCR8 LIBC320212-1 HuIgG1z | SYELTQPLSVSVALGQTARITCEGNNI |
| | mAb_LC LV huCCR8 | GSQNVHWYQQKPGQAPVLVMYRDS |
| | | NRPSGIPERFSGSKSGNTATLAISRAQ |
| | | AGDESDYYCQVWDGSAVVFGGGTT |
| | | LTVLG |
| 1038 | Hu anti-huCCR8 LIBC320212-1 HuIgG1z | QMQVVESGGGVVQPGRSLRLSCAAS |
| | mAb_HC HV huCCR8 | GFTFSSSGMHWVRQAPGKGLEWVA |
| | | VISHDGSNKYYADSVKGRFTISRDNS |
| | | KNTLYLQMNSLGGEDTAVYYCAKV |
| | | YYGSGIYYKNRYYYGMDVWGQGTT |
| | | VIVSS |
| 1039 | Hu anti-huCCR8 LIBC320384-1 HuIgG1z | SYELTQPLSVSVALGQTARITCGGHN |
| | mAb_LC LV huCCR8 | IGSKGVHWYQQKPGQAPVLVIYRNS |
| | | NRPSGIPERFSGSNSGNTATLTISRAQ |
| | | AGDEADYYCQVWDSSTVVFGGGTE |
| | | LTVLG |
| 1040 | Hu anti-huCCR8 LIBC320384-1 HuIgG1z | QVQLVESGGGVAQPGRSLRLSCAAS |
| | mAb_HC HV huCCR8 | GFNFSDCGMHWVRQAPGKGLEWVA |
| | | VISYDGGNKYYADSVKGRFTISRDDS |
| | | KNTLYLQTDSLRTEDTAVYYCAKVY |
| | | YGSGIYYKNRYYYGMDVWGQGTTV |
| | | TVSS |
| 1041 | Hu anti-huCCR8 LIBC320689-1 HuIgG1z | SYELTQPLSVSVALGQTGRITCGGNN |
| | mAb_LC LV huCCR8 | IGSKNVHWYQQKPGQAPVLVIYRSS |
| | | NRPSGIPERFSGSNSGNTATLTISRAQ |
| | | AGDESDYYCQIWDSSTVVFGGGTKL |
| | | TVLG |
| 1042 | Hu anti-huCCR8 LIBC320689-1 HuIgG1z | QVQVVESGGGVVQPGRSLRLSCAAS |
| | mAb_HC HV huCCR8 | GFTFSSYGMHWVRQAPGKGLEWVA |
| | | VISFDGNNKYYADSVKGRFTISRDNS |
| | | KNTLYLQMNSLRGEDTAVYYCARV |
| | | YYGSGSYYKNRYYYGMDVWGQGT |
| | | TVTVST |
| 1043 | Hu anti-huCCR8 LIBC321408-1 HuIgG1z | SYELTQPLSVSVALGQTARITCGGNN |
| | mAb_LC LV huCCR8 | IGSKNVHWYQQRPGQAPVLVIYRDS |
| | | NRPSGIPERLSGSKAGNTATLTISRAH |
| | | AGDEADYYCQVWDSSTVVFGGGTE |
| | | LTVQG |
| 1044 | Hu anti-huCCR8 LIBC321408-1 HuIgG1z | QVQLVESGGGVVQPGRSLRLSCAVS |
| | mAb_HC HV huCCR8 | GFTFSSNGMHWVRQAPGKGLEWVA |
| | | VISNDGSNKYYGDSVKGRFTISRDNS |
| | | KNTLYLQMNSLRAEDTAVYYCAKV |
| | | YYGSGIYYRNNYYYGMDVWGQGTT |
| | | VTVSS |
| 1045 | Hu anti-huCCR8 LIBC321824-1 HuIgG1z | SYELTQPLSVSVALGQTARITCGGNN |
| | mAb_LC LV huCCR8 | IGSKNVHWYQQKPGQAPILVIYRNTN |
| | | RPSGIPERFSGSNSGNTATLTISRAQV |
| | | GDESDYFCQVWDSSTVVFGGGTKLT |
| | | VLG |
| 1046 | Hu anti-huCCR8 LIBC321824-1 HuIgG1z | QVQVVESGGGVVQPGRSLRLSCGAS |
| | mAb_HC HV huCCR8 | GFTFSGYGMHWVRQAPGKGLEWVA |
| | | VISYDGSNKYYADSVKGRFPISRDNS |
| | | KNTLYLQMNSLRGEDTAVYYCARV |
| | | YYGSGIYYKNRYYYGMDVWGQGTT |
| | | VAVSS |
| 1047 | Hu anti-huCCR8 LIBC321845-1 HuIgG1z | SYELTQPLSVSVALGQTARITCGGNN |
| | mAb_LC LV huCCR8 | IGSKNVHWYQQKPGQAPILVIYRNTN |
| | | RPSGIPERFSGSNSGNTATLTISRAQV |
| | | GDESDYFCQVWDSSTVVFGGGTKLT |
| | | VLG |
| 1048 | Hu anti-huCCR8 LIBC321845-1 HuIgG1z | QVQVVESGGGVVQPGRSLRLSCGAS |
| | mAb_HC HV huCCR8 | GFTFSGYGMHWVRQAPGKGLEWVA |
| | | VISYDGSNKYYADSVKGRFTISRDNS |
| | | KNTLYLQMNSLRGEDTAVYYCARV |
| | | YYGSGIYYKNRYYYGMDVWGQGTT |
| | | VAVSS |
| 1049 | Hu anti-huCCR8 LIBC322176-1 HuIgG1z | SYDLTQPLSVSVALGQTARITCGGNN |
| | mAb_LC LV huCCR8 | IGDKNVHWYQQKPGQAPVLVIYRNN |
| | | VRPSGIPERFSGSNSGNTATLTISRAQ |
| | | AGDEADYYCQVWDSSTVVFGGGTK |
| | | LTVLG |
| 1050 | Hu anti-huCCR8 LIBC322176-1 HuIgG1z | QVQLVESGGGVVQPGRSLRLSCAAS |
| | mAb_HC HV huCCR8 | GLNFSNFGMHWVRQAPGKGLDWVA |
| | | VISYDGGNKYYADSVKGRFTVSRDN |
| | | SKNTLFLQMNSLRAEDTALYYCAKV |
| | | YYGSGSYYKKRYYYGMDVWGQGT |
| | | TVTVSS |
| 1051 | Hu anti-huCCR8 LIBC323412-1 HuIgG1z | SYELTQPLSVSVALGQTARITCGGNN |
| | mAb_LC LV huCCR8 | IGSKNVHWYQQKPGQAPVLVIYRDS |
| | | NRPSGIPERFSGSKSGNTATLTISRAQ |
| | | AGDEADYYCQVWDSSTVVFGGGAK |
| | | LTVLG |
| 1052 | Hu anti-huCCR8 LIBC323412-1 HuIgG1z | QVQLVESGGGVVQPGRSLRLSCAAS |
| | mAb_HC HV huCCR8 | GFNFSSCGMHWVRQAPGKGLEWVA |
| | | VISYDGTNKYYADSVKGRFTISRDNS |
| | | KNTLYLQMNSLRAEDTAVYYCAKV |
| | | YYGSGIYYKKNYYYGMDVWGQGTT |
| | | VTVSS |
| 1053 | huCCR8_32360_huIgG1z mAb_HC HV | EVQLVESGGGLVKPGGSLRLSCAAS |
| | huCCR8 | GFTFSNARMGWVRQAPGKGLEWVG |
| | | RIKSKTEGGTRDYAAPVKGRFTISRD |
| | | DSKNTLYLQMNSLKTEDTAVYYCTS |
| | | YSGVWGQGTMVTVSS |
| 1054 | huCCR8_32360_huIgG1z mAb_LC LV | DIVMTQSPDSLAVSLGERATINCKSS |
| | huCCR8 | QSVLYSSNNKNYLAWYHQKPGQSPK |
| | | LLISWASTRESGVPDRFSGSGSGTDFT |
| | | LTINSLQAEDVAVYYCQQYYSIPITFG |
| | | GGTKVEIKR |
| 1055 | huCCR8_32360_huIgG1z | ASTKGPSVFPLAPSSKSTSGGTAALG |
| | mAb(LC:K38R)_HC Constant | CLVKDYFPEPVTVSWNSGALTSGVH |
| | | TFPAVLQSSGLYSLSSVVTVPSSSLGT |
| | | QTYICNVNHKPSNTKVDKKVEPKSC |
| | | DKTHTCPPCPAPELLGGPSVFLFPPKP |
| | | KDTLMISRTPEVTCVVVDVSHEDPEV |
| | | KFNWYVDGVEVHNAKTKPREEQYN |
| | | STYRVVSVLTVLHQDWLNGKEYKC |
| | | KVSNKALPAPIEKTISKAKGQPREPQ |
| | | VYTLPPSREEMTKNQVSLTCLVKGF |
| | | YPSDIAVEWESNGQPENNYKTTPPVL |
| | | DSDGSFFLYSKLTVDKSRWQQGNVF |
| | | SCSVMHEALHNHYTQKSLSLSPGK |
| 1056 | huCCR8_32360_huIgG1z | TVAAPSVFIFPPSDEQLKSGTASVVCL |
| | mAb(LC:K38R)_LC Constant | LNNFYPREAKVQWKVDNALQSGNS |
| | | QESVTEQDSKDSTYSLSSTLTLSKAD |
| | | YEKHKVYACEVTHQGLSSPVTKSFN |
| | | RGEC |
| 1057 | anti- | ASTKGPSVFPLAPSSKSTSGGTAALG |
| | huCCR8_44379(VH:D72S, VL:N67A_S68A_ | CLVKDYFPEPVTVSWNSGALTSGVH |
| | M99G_W109F_S111A)_huIgG1z (mAb)_HC | TFPAVLQSSGLYSLSSVVTVPSSSLGT |
| | Constant | QTYICNVNHKPSNTKVDKKVEPKSC |
| | | DKTHTCPPCPAPELLGGPSVFLFPPKP |
| | | KDTLMISRTPEVTCVVVDVSHEDPEV |
| | | KFNWYVDGVEVHNAKTKPREEQYN |
| | | STYRVVSVLTVLHQDWLNGKEYKC |
| | | KVSNKALPAPIEKTISKAKGQPREPQ |
| | | VYTLPPSREEMTKNQVSLTCLVKGF |
| | | YPSDIAVEWESNGQPENNYKTTPPVL |
| | | DSDGSFFLYSKLTVDKSRWQQGNVF |
| | | SCSVMHEALHNHYTQKSLSLSPGK |
| 1058 | anti- | QPKAAPSVTLFPPSSEELQANKATLV |
| | huCCR8_44379(VH:D72S, VL:N67A_S68A_ | CLISDFYPGAVTVAWKADSSPVKAG |
| | M99G_W109F_S111A)_huIgG1z (mAb)_LC | VETTTPSKQSNNKYAASSYLSLTPEQ |
| | Constant | WKSHRSYSCQVTHEGSTVEKTVAPT |
| | | ECS |
| 1059 | anti- | ASTKGPSVFPLAPSSKSTSGGTAALG |
| | huCCR8_44379(VH:D61A_D72A, VL:N67Q_ | CLVKDYFPEPVTVSWNSGALTSGVH |
| | M99E_W109F_S111A)_huIgG1z | TFPAVLQSSGLYSLSSVVTVPSSSLGT |
| | (mAb)_HC Constant | QTYICNVNHKPSNTKVDKKVEPKSC |
| | | DKTHTCPPCPAPELLGGPSVFLFPPKP |
| | | KDTLMISRTPEVTCVVVDVSHEDPEV |
| | | KFNWYVDGVEVHNAKTKPREEQYN |
| | | STYRVVSVLTVLHQDWLNGKEYKC |
| | | KVSNKALPAPIEKTISKAKGQPREPQ |
| | | VYTLPPSREEMTKNQVSLTCLVKGF |
| | | YPSDIAVEWESNGQPENNYKTTPPVL |
| | | DSDGSFFLYSKLTVDKSRWQQGNVF |
| | | SCSVMHEALHNHYTQKSLSLSPGK |
| 1060 | anti- | QPKAAPSVTLFPPSSEELQANKATLV |
| | huCCR8_44379(VH:D61A_D72A, VL:N67Q_ | CLISDFYPGAVTVAWKADSSPVKAG |
| | M99E_W109F_S111A)_huIgG1z | VETTTPSKQSNNKYAASSYLSLTPEQ |
| | (mAb)_LC Constant | WKSHRSYSCQVTHEGSTVEKTVAPT |
| | | ECS |
| 1061 | anti- | ASTKGPSVFPLAPSSKSTSGGTAALG |
| | huCCR8_44379(VH:D61S, VL:N67Q_M99G_ | CLVKDYFPEPVTVSWNSGALTSGVH |
| | W109F_S111A)_huIgG1z (mAb)_HC | TFPAVLQSSGLYSLSSVVTVPSSSLGT |
| | Constant | QTYICNVNHKPSNTKVDKKVEPKSC |
| | | DKTHTCPPCPAPELLGGPSVFLFPPKP |
| | | KDTLMISRTPEVTCVVVDVSHEDPEV |
| | | KFNWYVDGVEVHNAKTKPREEQYN |
| | | STYRVVSVLTVLHQDWLNGKEYKC |
| | | KVSNKALPAPIEKTISKAKGQPREPQ |
| | | VYTLPPSREEMTKNQVSLTCLVKGF |
| | | YPSDIAVEWESNGQPENNYKTTPPVL |
| | | DSDGSFFLYSKLTVDKSRWQQGNVF |
| | | SCSVMHEALHNHYTQKSLSLSPGK |
| 1062 | anti- | QPKAAPSVTLFPPSSEELQANKATLV |
| | huCCR8_44379(VH:D61S, VL:N67Q_M99G_ | CLISDFYPGAVTVAWKADSSPVKAG |
| | W109F_S111A)_huIgG1z (mAb)_LC | VETTTPSKQSNNKYAASSYLSLTPEQ |
| | Constant | WKSHRSYSCQVTHEGSTVEKTVAPT |
| | | ECS |
| 1063 | Hu anti-huCCR8 LIBC315615-1 HuIgG1z | QPKAAPSVTLFPPSSEELQANKATLV |
| | mAb_LC Constant | CLISDFYPGAVTVAWKADSSPVKAG |
| | | VETTTPSKQSNNKYAASSYLSLTPEQ |
| | | WKSHRSYSCQVTHEGSTVEKTVAPT |
| | | ECS |
| 1064 | Hu anti-huCCR8 LIBC315615-1 HuIgG1z | ASTKGPSVFPLAPSSKSTSGGTAALG |
| | mAb_HC Constant | CLVKDYFPEPVTVSWNSGALTSGVH |
| | | TFPAVLQSSGLYSLSSVVTVPSSSLGT |
| | | QTYICNVNHKPSNTKVDKKVEPKSC |
| | | DKTHTCPPCPAPELLGGPSVFLFPPKP |
| | | KDTLMISRTPEVTCVVVDVSHEDPEV |
| | | KFNWYVDGVEVHNAKTKPREEQYN |
| | | STYRVVSVLTVLHQDWLNGKEYKC |
| | | KVSNKALPAPIEKTISKAKGQPREPQ |
| | | VYTLPPSREEMTKNQVSLTCLVKGF |
| | | YPSDIAVEWESNGQPENNYKTTPPVL |
| | | DSDGSFFLYSKLTVDKSRWQQGNVF |
| | | SCSVMHEALHNHYTQKSLSLSPGK |
| 1065 | Hu anti-huCCR8 LIBC317152-1 HuIgG1z | QPKAAPSVTLFPPSSEELQANKATLV |
| | mAb_LC Constant | CLISDFYPGAVTVAWKADSSPVKAG |
| | | VETTTPSKQSNNKYAASSYLSLTPEQ |
| | | WKSHRSYSCQVTHEGSTVEKTVAPT |
| | | ECS |
| 1066 | Hu anti-huCCR8 LIBC317152-1 HuIgG1z | ASTKGPSVFPLAPSSKSTSGGTAALG |
| | mAb_HC Constant | CLVKDYFPEPVTVSWNSGALTSGVH |
| | | TFPAVLQSSGLYSLSSVVTVPSSSLGT |
| | | QTYICNVNHKPSNTKVDKKVEPKSC |
| | | DKTHTCPPCPAPELLGGPSVFLFPPKP |
| | | KDTLMISRTPEVTCVVVDVSHEDPEV |
| | | KFNWYVDGVEVHNAKTKPREEQYN |
| | | STYRVVSVLTVLHQDWLNGKEYKC |
| | | KVSNKALPAPIEKTISKAKGQPREPQ |
| | | VYTLPPSREEMTKNQVSLTCLVKGF |
| | | YPSDIAVEWESNGQPENNYKTTPPVL |
| | | DSDGSFFLYSKLTVDKSRWQQGNVF |
| | | SCSVMHEALHNHYTQKSLSLSPGK |
| 1067 | Hu anti-huCCR8 LIBC317471-1 HuIgG1z | QPKAAPSVTLFPPSSEELQANKATLV |
| | mAb_LC Constant | CLISDFYPGAVTVAWKADSSPVKAG |
| | | VETTTPSKQSNNKYAASSYLSLTPEQ |
| | | WKSHRSYSCQVTHEGSTVEKTVAPT |
| | | ECS |
| 1068 | Hu anti-huCCR8 LIBC317471-1 HuIgG1z | ASTKGPSVFPLAPSSKSTSGGTAALG |
| | mAb_HC Constant | CLVKDYFPEPVTVSWNSGALTSGVH |
| | | TFPAVLQSSGLYSLSSVVTVPSSSLGT |
| | | QTYICNVNHKPSNTKVDKKVEPKSC |
| | | DKTHTCPPCPAPELLGGPSVFLFPPKP |
| | | KDTLMISRTPEVTCVVVDVSHEDPEV |
| | | KFNWYVDGVEVHNAKTKPREEQYN |
| | | STYRVVSVLTVLHQDWLNGKEYKC |
| | | KVSNKALPAPIEKTISKAKGQPREPQ |
| | | VYTLPPSREEMTKNQVSLTCLVKGF |
| | | YPSDIAVEWESNGQPENNYKTTPPVL |
| | | DSDGSFFLYSKLTVDKSRWQQGNVF |
| | | SCSVMHEALHNHYTQKSLSLSPGK |
| 1069 | Hu anti-huCCR8 LIBC317977-1 HuIgG1z | QPKAAPSVTLFPPSSEELQANKATLV |
| | mAb_LC Constant | CLISDFYPGAVTVAWKADSSPVKAG |
| | | VETTTPSKQSNNKYAASSYLSLTPEQ |
| | | WKSHRSYSCQVTHEGSTVEKTVAPT |
| | | ECS |
| 1070 | Hu anti-huCCR8 LIBC317977-1 HuIgG1z | ASTKGPSVFPLAPSSKSTSGGTAALG |
| | mAb_HC Constant | CLVKDYFPEPVTVSWNSGALTSGVH |
| | | TFPAVLQSSGLYSLSSVVTVPSSSLGT |
| | | QTYICNVNHKPSNTKVDKKVEPKSC |
| | | DKTHTCPPCPAPELLGGPSVFLFPPKP |
| | | KDTLMISRTPEVTCVVVDVSHEDPEV |
| | | KFNWYVDGVEVHNAKTKPREEQYN |
| | | STYRVVSVLTVLHQDWLNGKEYKC |
| | | KVSNKALPAPIEKTISKAKGQPREPQ |
| | | VYTLPPSREEMTKNQVSLTCLVKGF |
| | | YPSDIAVEWESNGQPENNYKTTPPVL |
| | | DSDGSFFLYSKLTVDKSRWQQGNVF |
| | | SCSVMHEALHNHYTQKSLSLSPGK |
| 1071 | Hu anti-huCCR8 LIBC318774-1 HuIgG1z | QPKAAPSVTLFPPSSEELQANKATLV |
| | mAb_LC Constant | CLISDFYPGAVTVAWKADSSPVKAG |
| | | VETTTPSKQSNNKYAASSYLSLTPEQ |
| | | WKSHRSYSCQVTHEGSTVEKTVAPT |
| | | ECS |
| 1072 | Hu anti-huCCR8 LIBC318774-1 HuIgG1z | ASTKGPSVFPLAPSSKSTSGGTAALG |
| | mAb_HC Constant | CLVKDYFPEPVTVSWNSGALTSGVH |
| | | TFPAVLQSSGLYSLSSVVTVPSSSLGT |
| | | QTYICNVNHKPSNTKVDKKVEPKSC |
| | | DKTHTCPPCPAPELLGGPSVFLFPPKP |
| | | KDTLMISRTPEVTCVVVDVSHEDPEV |
| | | KFNWYVDGVEVHNAKTKPREEQYN |
| | | STYRVVSVLTVLHQDWLNGKEYKC |
| | | KVSNKALPAPIEKTISKAKGQPREPQ |
| | | VYTLPPSREEMTKNQVSLTCLVKGF |
| | | YPSDIAVEWESNGQPENNYKTTPPVL |
| | | DSDGSFFLYSKLTVDKSRWQQGNVF |
| | | SCSVMHEALHNHYTQKSLSLSPGK |
| 1073 | Hu anti-huCCR8 LIBC319840-1 HuIgG1z | QPKAAPSVTLFPPSSEELQANKATLV |
| | mAb_LC Constant | CLISDFYPGAVTVAWKADSSPVKAG |
| | | VETTTPSKQSNNKYAASSYLSLTPEQ |
| | | WKSHRSYSCQVTHEGSTVEKTVAPT |
| | | ECS |
| 1074 | Hu anti-huCCR8 LIBC319840-1 HuIgG1z | ASTKGPSVFPLAPSSKSTSGGTAALG |
| | mAb_HC Constant | CLVKDYFPEPVTVSWNSGALTSGVH |
| | | TFPAVLQSSGLYSLSSVVTVPSSSLGT |
| | | QTYICNVNHKPSNTKVDKKVEPKSC |
| | | DKTHTCPPCPAPELLGGPSVFLFPPKP |
| | | KDTLMISRTPEVTCVVVDVSHEDPEV |
| | | KFNWYVDGVEVHNAKTKPREEQYN |
| | | STYRVVSVLTVLHQDWLNGKEYKC |
| | | KVSNKALPAPIEKTISKAKGQPREPQ |
| | | VYTLPPSREEMTKNQVSLTCLVKGF |
| | | YPSDIAVEWESNGQPENNYKTTPPVL |
| | | DSDGSFFLYSKLTVDKSRWQQGNVF |
| | | SCSVMHEALHNHYTQKSLSLSPGK |
| 1075 | Hu anti-huCCR8 LIBC320212-1 HuIgG1z | QPKAAPSVTLFPPSSEELQANKATLV |
| | mAb_LC Constant | CLISDFYPGAVTVAWKADSSPVKAG |
| | | VETTTPSKQSNNKYAASSYLSLTPEQ |
| | | WKSHRSYSCQVTHEGSTVEKTVAPT |
| | | ECS |
| 1076 | Hu anti-huCCR8 LIBC320212-1 HuIgG1z | ASTKGPSVFPLAPSSKSTSGGTAALG |
| | mAb_HC Constant | CLVKDYFPEPVTVSWNSGALTSGVH |
| | | TFPAVLQSSGLYSLSSVVTVPSSSLGT |
| | | QTYICNVNHKPSNTKVDKKVEPKSC |
| | | DKTHTCPPCPAPELLGGPSVFLFPPKP |
| | | KDTLMISRTPEVTCVVVDVSHEDPEV |
| | | KFNWYVDGVEVHNAKTKPREEQYN |
| | | STYRVVSVLTVLHQDWLNGKEYKC |
| | | KVSNKALPAPIEKTISKAKGQPREPQ |
| | | VYTLPPSREEMTKNQVSLTCLVKGF |
| | | YPSDIAVEWESNGQPENNYKTTPPVL |
| | | DSDGSFFLYSKLTVDKSRWQQGNVF |
| | | SCSVMHEALHNHYTQKSLSLSPGK |
| 1077 | Hu anti-huCCR8 LIBC320384-1 HuIgG1z | QPKAAPSVTLFPPSSEELQANKATLV |
| | mAb_LC Constant | CLISDFYPGAVTVAWKADSSPVKAG |
| | | VETTTPSKQSNNKYAASSYLSLTPEQ |
| | | WKSHRSYSCQVTHEGSTVEKTVAPT |
| | | ECS |
| 1078 | Hu anti-huCCR8 LIBC320384-1 HuIgG1z | ASTKGPSVFPLAPSSKSTSGGTAALG |
| | mAb_HC Constant | CLVKDYFPEPVTVSWNSGALTSGVH |
| | | TFPAVLQSSGLYSLSSVVTVPSSSLGT |
| | | QTYICNVNHKPSNTKVDKKVEPKSC |
| | | DKTHTCPPCPAPELLGGPSVFLFPPKP |
| | | KDTLMISRTPEVTCVVVDVSHEDPEV |
| | | KFNWYVDGVEVHNAKTKPREEQYN |
| | | STYRVVSVLTVLHQDWLNGKEYKC |
| | | KVSNKALPAPIEKTISKAKGQPREPQ |
| | | VYTLPPSREEMTKNQVSLTCLVKGF |
| | | YPSDIAVEWESNGQPENNYKTTPPVL |
| | | DSDGSFFLYSKLTVDKSRWQQGNVF |
| | | SCSVMHEALHNHYTQKSLSLSPGK |
| 1079 | Hu anti-huCCR8 LIBC320689-1 HuIgG1z | QPKAAPSVTLFPPSSEELQANKATLV |
| | mAb_LC Constant | CLISDFYPGAVTVAWKADSSPVKAG |
| | | VETTTPSKQSNNKYAASSYLSLTPEQ |
| | | WKSHRSYSCQVTHEGSTVEKTVAPT |
| | | ECS |
| 1080 | Hu anti-huCCR8 LIBC320689-1 HuIgG1z | ASTKGPSVFPLAPSSKSTSGGTAALG |
| | mAb_HC Constant | CLVKDYFPEPVTVSWNSGALTSGVH |
| | | TFPAVLQSSGLYSLSSVVTVPSSSLGT |
| | | QTYICNVNHKPSNTKVDKKVEPKSC |
| | | DKTHTCPPCPAPELLGGPSVFLFPPKP |
| | | KDTLMISRTPEVTCVVVDVSHEDPEV |
| | | KFNWYVDGVEVHNAKTKPREEQYN |
| | | STYRVVSVLTVLHQDWLNGKEYKC |
| | | KVSNKALPAPIEKTISKAKGQPREPQ |
| | | VYTLPPSREEMTKNQVSLTCLVKGF |
| | | YPSDIAVEWESNGQPENNYKTTPPVL |
| | | DSDGSFFLYSKLTVDKSRWQQGNVF |
| | | SCSVMHEALHNHYTQKSLSLSPGK |
| 1081 | Hu anti-huCCR8 LIBC321408-1 HuIgG1z | QPKAAPSVTLFPPSSEELQANKATLV |
| | mAb_LC Constant | CLISDFYPGAVTVAWKADSSPVKAG |
| | | VETTTPSKQSNNKYAASSYLSLTPEQ |
| | | WKSHRSYSCQVTHEGSTVEKTVAPT |
| | | ECS |
| 1082 | Hu anti-huCCR8 LIBC321408-1 HuIgG1z | ASTKGPSVFPLAPSSKSTSGGTAALG |
| | mAb_HC Constant | CLVKDYFPEPVTVSWNSGALTSGVH |
| | | TFPAVLQSSGLYSLSSVVTVPSSSLGT |
| | | QTYICNVNHKPSNTKVDKKVEPKSC |
| | | DKTHTCPPCPAPELLGGPSVFLFPPKP |
| | | KDTLMISRTPEVTCVVVDVSHEDPEV |
| | | KFNWYVDGVEVHNAKTKPREEQYN |
| | | STYRVVSVLTVLHQDWLNGKEYKC |
| | | KVSNKALPAPIEKTISKAKGQPREPQ |
| | | VYTLPPSREEMTKNQVSLTCLVKGF |
| | | YPSDIAVEWESNGQPENNYKTTPPVL |
| | | DSDGSFFLYSKLTVDKSRWQQGNVF |
| | | SCSVMHEALHNHYTQKSLSLSPGK |
| 1083 | Hu anti-huCCR8 LIBC321824-1 HuIgG1z | QPKAAPSVTLFPPSSEELQANKATLV |
| | mAb_LC Constant | CLISDFYPGAVTVAWKADSSPVKAG |
| | | VETTTPSKQSNNKYAASSYLSLTPEQ |
| | | WKSHRSYSCQVTHEGSTVEKTVAPT |
| | | ECS |
| 1084 | Hu anti-huCCR8 LIBC321824-1 HuIgG1z | ASTKGPSVFPLAPSSKSTSGGTAALG |
| | mAb_HC Constant | CLVKDYFPEPVTVSWNSGALTSGVH |
| | | TFPAVLQSSGLYSLSSVVTVPSSSLGT |
| | | QTYICNVNHKPSNTKVDKKVEPKSC |
| | | DKTHTCPPCPAPELLGGPSVFLFPPKP |
| | | KDTLMISRTPEVTCVVVDVSHEDPEV |
| | | KFNWYVDGVEVHNAKTKPREEQYN |
| | | STYRVVSVLTVLHQDWLNGKEYKC |
| | | KVSNKALPAPIEKTISKAKGQPREPQ |
| | | VYTLPPSREEMTKNQVSLTCLVKGF |
| | | YPSDIAVEWESNGQPENNYKTTPPVL |
| | | DSDGSFFLYSKLTVDKSRWQQGNVF |
| | | SCSVMHEALHNHYTQKSLSLSPGK |
| 1085 | Hu anti-huCCR8 LIBC321845-1 HuIgG1z | QPKAAPSVTLFPPSSEELQANKATLV |
| | mAb_LC Constant | CLISDFYPGAVTVAWKADSSPVKAG |
| | | VETTTPSKQSNNKYAASSYLSLTPEQ |
| | | WKSHRSYSCQVTHEGSTVEKTVAPT |
| | | ECS |
| 1086 | Hu anti-huCCR8 LIBC321845-1 HuIgG1z | ASTKGPSVFPLAPSSKSTSGGTAALG |
| | mAb_HC Constant | CLVKDYFPEPVTVSWNSGALTSGVH |
| | | TFPAVLQSSGLYSLSSVVTVPSSSLGT |
| | | QTYICNVNHKPSNTKVDKKVEPKSC |
| | | DKTHTCPPCPAPELLGGPSVFLFPPKP |
| | | KDTLMISRTPEVTCVVVDVSHEDPEV |
| | | KFNWYVDGVEVHNAKTKPREEQYN |
| | | STYRVVSVLTVLHQDWLNGKEYKC |
| | | KVSNKALPAPIEKTISKAKGQPREPQ |
| | | VYTLPPSREEMTKNQVSLTCLVKGF |
| | | YPSDIAVEWESNGQPENNYKTTPPVL |
| | | DSDGSFFLYSKLTVDKSRWQQGNVF |
| | | SCSVMHEALHNHYTQKSLSLSPGK |
| 1087 | Hu anti-huCCR8 LIBC322176-1 HuIgG1z | QPKAAPSVTLFPPSSEELQANKATLV |
| | mAb_LC Constant | CLISDFYPGAVTVAWKADSSPVKAG |
| | | VETTTPSKQSNNKYAASSYLSLTPEQ |
| | | WKSHRSYSCQVTHEGSTVEKTVAPT |
| | | ECS |
| 1088 | Hu anti-huCCR8 LIBC322176-1 HuIgG1z | ASTKGPSVFPLAPSSKSTSGGTAALG |
| | mAb_HC Constant | CLVKDYFPEPVTVSWNSGALTSGVH |
| | | TFPAVLQSSGLYSLSSVVTVPSSSLGT |
| | | QTYICNVNHKPSNTKVDKKVEPKSC |
| | | DKTHTCPPCPAPELLGGPSVFLFPPKP |
| | | KDTLMISRTPEVTCVVVDVSHEDPEV |
| | | KFNWYVDGVEVHNAKTKPREEQYN |
| | | STYRVVSVLTVLHQDWLNGKEYKC |
| | | KVSNKALPAPIEKTISKAKGQPREPQ |
| | | VYTLPPSREEMTKNQVSLTCLVKGF |
| | | YPSDIAVEWESNGQPENNYKTTPPVL |
| | | DSDGSFFLYSKLTVDKSRWQQGNVF |
| | | SCSVMHEALHNHYTQKSLSLSPGK |
| 1089 | Hu anti-huCCR8 LIBC323412-1 HuIgG1z | QPKAAPSVTLFPPSSEELQANKATLV |
| | mAb_LC Constant | CLISDFYPGAVTVAWKADSSPVKAG |
| | | VETTTPSKQSNNKYAASSYLSLTPEQ |
| | | WKSHRSYSCQVTHEGSTVEKTVAPT |
| | | ECS |
| 1090 | Hu anti-huCCR8 LIBC323412-1 HuIgG1z | ASTKGPSVFPLAPSSKSTSGGTAALG |
| | mAb_HC Constant | CLVKDYFPEPVTVSWNSGALTSGVH |
| | | TFPAVLQSSGLYSLSSVVTVPSSSLGT |
| | | QTYICNVNHKPSNTKVDKKVEPKSC |
| | | DKTHTCPPCPAPELLGGPSVFLFPPKP |
| | | KDTLMISRTPEVTCVVVDVSHEDPEV |
| | | KFNWYVDGVEVHNAKTKPREEQYN |
| | | STYRVVSVLTVLHQDWLNGKEYKC |
| | | KVSNKALPAPIEKTISKAKGQPREPQ |
| | | VYTLPPSREEMTKNQVSLTCLVKGF |
| | | YPSDIAVEWESNGQPENNYKTTPPVL |
| | | DSDGSFFLYSKLTVDKSRWQQGNVF |
| | | SCSVMHEALHNHYTQKSLSLSPGK |
| 1091 | huCCR8_32360_huIgG1z mAb_HC Constant | ASTKGPSVFPLAPSSKSTSGGTAALG |
| | | CLVKDYFPEPVTVSWNSGALTSGVH |
| | | TFPAVLQSSGLYSLSSVVTVPSSSLGT |
| | | QTYICNVNHKPSNTKVDKKVEPKSC |
| | | DKTHTCPPCPAPELLGGPSVFLFPPKP |
| | | KDTLMISRTPEVTCVVVDVSHEDPEV |
| | | KFNWYVDGVEVHNAKTKPREEQYN |
| | | STYRVVSVLTVLHQDWLNGKEYKC |
| | | KVSNKALPAPIEKTISKAKGQPREPQ |
| | | VYTLPPSREEMTKNQVSLTCLVKGF |
| | | YPSDIAVEWESNGQPENNYKTTPPVL |
| | | DSDGSFFLYSKLTVDKSRWQQGNVF |
| | | SCSVMHEALHNHYTQKSLSLSPGK |
| 1092 | huCCR8_32360_huIgG1z mAb_LC Constant | TVAAPSVFIFPPSDEQLKSGTASVVCL |
| | | LNNFYPREAKVQWKVDNALQSGNS |
| | | QESVTEQDSKDSTYSLSSTLTLSKAD |
| | | YEKHKVYACEVTHQGLSSPVTKSFN |
| | | RGEC |
| 1093 | MPK20298-A4_SCFV | QVQLVESGGGVVQPGRSLRLSCVVS |
| | | GFNFSNNGMHWVRQAPGKGLEWVA |
| | | VISNDGSNKYYADSVKGRFTISRDNS |
| | | KNTLYLQMNSLRTEDTAVYYCAKV |
| | | YYGSGIYYKNRNYYGMDVWGQGTT |
| | | VTVSSGGGGSGGGGSGGGGSSYELT |
| | | QPPSVSVALGQTARITCGGNNIGSQN |
| | | VHWYQQKPGQAPVLVIYRDSNRPSG |
| | | IPDRFSGSKSGNTATLTISRAQAGDEA |
| | | DYYCQVWDSSTVVFGGGTKLTVL |
| 1094 | MPK20299-D2_SCFV | QVQLVESGGGVVQPGRSLRLSCAAS |
| | | GFNFSNYGMHWVRQAPGKGLEWVA |
| | | VISYDGSNKYYADSVKGRFTISRDNS |
| | | KNTLYLQMNSLRAEDTAVYFCARVY |
| | | YGSGIYYKKRYYYGMDVWGQGTTV |
| | | TVSSGGGGSGGGGSGGGGSSYELTQ |
| | | PPSVSVALGQTARITCGGHNIGSKGV |
| | | HWYQQKPGQAPVLVIYRNSNRPSGIP |
| | | ERFSGSNSGNTATLTITRAQAGDEAD |
| | | YYCQVWDSSTVVFGGGTKLTVL |
| 1095 | MPK20299-F11_SCFV | QVQLVESGGGVVQPGRSLRLSCAPS |
| | | GFNFSNYGMHWVRQAPGKGLEWVA |
| | | VISYDGSNKYYADSVKGRFTISRDNS |
| | | KNTLFLQMNSLRAEDTAVYFCARVY |
| | | YGSGSYYKKRYYYGMDVWGQGTT |
| | | VTVSSGGGGSGGGGSGGGGSSYELT |
| | | QPPSVSVALGQTARITCGGNNIGSQN |
| | | VHWYQQKPGQAPVLVIYRDSNRPSG |
| | | IPERFSGSKSGNTATLTISRAQAGDEA |
| | | DYYCQVWDSSTVVFGGGTQLTVL |
| 1096 | MPK20298-H6_SCFV | QVQLVESGGGVVQPGRSLRLSCAAS |
| | | GFTFSSSGMHWVRQAPGKGLEWVA |
| | | VISYDGTNKYYADSVKGRFTISRDNS |
| | | KNTLYLQMNSLRAEDTAVYYCAKV |
| | | YYGSGIYYKNRYYYGMDVWGQGTT |
| | | VTVSSGGGGSGGGGSGGGGSSYELT |
| | | QPPSVSVALGQTARITCGGHNIGSKG |
| | | VHWYQQKPGQAPVLVIYRNSNRPSG |
| | | IPERFSGSNSGNTATLTISRAQAGDEA |
| | | DYYCQVWDSSTVVFGGGTQLTVL |
| 1097 | MPK20297-A4_SCFV | QVQLVESGGGVVQPGRSLRLSCAVS |
| | | GFNFSNYGMHWVRQVPGRGLDWVA |
| | | VISNDGSNKYYADSVKGRFTISRDNS |
| | | KNTLYLQMDSLRTEDTAVYYCAKV |
| | | YYGSGIYYKKRYYYGMDVWGQGTT |
| | | VTVSSGGGGSGGGGSGGGGSSYELT |
| | | QPPSVSVALGQTARITCGGHNIGSQN |
| | | VHWYQQKPGQAPVLVIYRDSNRPSG |
| | | IPERFSGSKSGNTATLTISRAQAGDEA |
| | | DYYCQVWDSSTVVFGGGTQLTVL |
| 1098 | MPK20299-H8_SCFV | QVQLVESGGGVVQPGRSLRLSCAAS |
| | | GFNFSNYGMHWVRQAPGKGLEWVA |
| | | VISYDGSNKYYADSVKGRFTISRDNS |
| | | KNTLYLQMNSLRAEDTAVYFCARVY |
| | | YGSGIYYKKRYYYGMDVWGQGTTV |
| | | TVSSGGGGSGGGGSGGGGSSYELTQ |
| | | PPSVSVAPGQTARITCGGNNIGSKNV |
| | | HWYQQKAGQAPVQVIYRNSNRPSGI |
| | | PARFSGSNSGNTATLTISRAQAGDEA |
| | | DYYCQVWDSSTVVFGGGTKLTVL |
| 1099 | MPK20300-C11_SCFV | QVQLVESGGGVVQPGRSLRLSCAAS |
| | | GFTFSSYGMHWVRQAPGKGLEWVA |
| | | VISYDGSNKYYADSVKGRFTISRDNS |
| | | KNTLYLQMNSLRGEDTAVYYCARV |
| | | YYGSGSYYKNRYYYGMDVWGQGT |
| | | TVTVSSGGGGSGGGGSGGGGSSYEL |
| | | TQPPSVSVAPGQTARIPCGGNNIGSK |
| | | NVHWYQQKPGQAPVLVIYRDINRPS |
| | | GIPERFSGSNSGNTATLTISRAQAGDE |
| | | ADYYCQVWDSSVVFGGGTKLTVL |
| 1100 | MPK20298-B1_SCFV | QVQLVESGGGVVQPGRSLRLSCAAS |
| | | GFNFSNYGMHWVRQAPGKGLEWVA |
| | | VISYDGSNKYYADSVKGRFTISRDNS |
| | | KNTLYLQMNSLRAEDTAVYFCARVY |
| | | YGSGIYYKKRYYYGMDVWGQGTTV |
| | | TVSSGGGGSGGGGSGGGGSSYELTQ |
| | | PPSVSVALGQTARLTCEGNNIGSKNV |
| | | HWYQQKPGQAPVLVIYRNSNRPSGIP |
| | | ERFSGSNSGNTATLTISRVQAGDEAD |
| | | YYCQAWDSSTVVFGGGTQLTVL |
| 1101 | MPK20297-E5_SCFV | QVQLVESGGGLVKPGGSLRLSCAVS |
| | | GFNFSNNGMHWVRQAPGKGLEWVA |
| | | VISYDGSNKYYTDSVKGRFTISRDNS |
| | | KNTLYLQMNSLRTEDTAVYYCAKV |
| | | YYGSGIYYKKRYYYGMDVWGQGTT |
| | | VTVSSGGGGSGGGGSGGGGSSYELT |
| | | QPLSVSEALGQTARITCGGNNIGSKN |
| | | VHWYQQKPGQAPVLVIYRDSNRPSG |
| | | IPERFSGSNSGNAATLTISRVEAGDEA |
| | | DYYCQVWDSSSDHVVFGGGTQLTV |
| | | L |
| 1102 | MPK20299-A3_SCFV | QVQLVESGGGVVQPGRSLRLSCAAS |
| | | GFNFSNYGMHWVRQAPGKGLEWVA |
| | | VISYDGSNKYYADSVKGRFTISRDNS |
| | | KNTLYLQMNSLRAEDTAVYFCARVY |
| | | YGSGIYYKKRYYYGMDVWGQGTTV |
| | | TVSSGGGGSGGGGSGGGGSSYELTQ |
| | | PPSVSVAPGQTARITCGGNNIGSKNV |
| | | HWYQQKPGQAPVLVIYRNSNRPSGIP |
| | | ERFSGSNSGNTATLTISGTQAMDEAD |
| | | YYCQAWDSSNVVFGGGTQLTVL |
| 1103 | MPK20297-B4_SCFV | QVQLVESGGGVVQPGRSLRLSCVVS |
| | | GFNFSRNGMHWVRQVPGRGLDWVA |
| | | VISNDGSNKYYADSVKGRFTISRDNS |
| | | KNTLYLQMNSLRAEDTAVYYCAKV |
| | | YYGSGIYYKNNYYYGMDVWGQGTT |
| | | VTVSSGGGGSGGGGSGGGGSSYELT |
| | | QPLSVSVALGQTARITCGGNNIGSQN |
| | | VHWYQQKPGQAPVLVIYRDSNRPSG |
| | | IPDRFSGSKSGNTATLTISRAQAGDEA |
| | | DYYCQVWDSSTVVFGGGTQLTVL |
| 1104 | MPK20298-F6_SCFV | QVQLVESGGGVVQPGRSLRLSCVVS |
| | | GFNFSRNGMHWVRQVPGRGLDWVA |
| | | VISNDGSNKYYADSVKGRFTISRDNS |
| | | KNTLYLQMNSLRAEDTAVYYCAKV |
| | | YYGSGIYYKNRYYYGMDVWGQGTT |
| | | VTVSSGGGGSGGGGSGGGGSSYELT |
| | | QPPSVSVAPGQTARITCGGNNIGSKN |
| | | VHWYQQKPGQAPVLVIYRDSNRPSG |
| | | IPERFSGSKSGTTATLTISRAQAGDEA |
| | | EYYCQVWDSSTVVFGGGTELTVL |
| 1105 | MPK20299-H3_SCFV | QVQLVESGGGVVQPGRSLRLSCAAS |
| | | GFNFSNYGMHWVRQAPGKGLEWVA |
| | | VISYDGSNKYYADSVKGRFTISRDNS |
| | | KNTLYLQMNSLRAEDTAVYFCARVY |
| | | YGSGIYYKKRYYYGMDVWGQGTTV |
| | | TVSSGGGGSGGGGSGGGGSSYELTQ |
| | | PLSVSVALGQTARITCGGNNIGSKNV |
| | | HWYQQKPGQAPVLAIYRNSNRPSGIP |
| | | ERFTGSNSGNTATLTISRAQAGDESD |
| | | YYCQIWDSSTVVFGGGTKLTVL |
| 1106 | MPK20298-B9_SCFV | QVQLVESGGGVVQPGRSLRLSCAAS |
| | | GFNFSRNGMHWVRQVPGRGLDWVA |
| | | VISNDGSNKYYADSVKGRFTISRDNS |
| | | KNTLYLQMNSLRAEDTAVYYCAKV |
| | | YYGSGIYYKKNYYYGMDVWGQGTT |
| | | VTVSSGGGGSGGGGSGGGGSSYELT |
| | | QPPSVSVALGQTARISCGGNNIGSKN |
| | | VHWYQQKPGQAPVLVIYRDSNRPSG |
| | | IPERFSGSKSGTTATLTISRAQAGDEA |
| | | EYYCQVWDSSTVVFGGGTQLTVL |
| 1107 | MPK20299-E2_SCFV | QVQLVESGGGVVQPGRSLRLSCAVS |
| | | GFNFSNNGMHWVRQAPGKGLEWVA |
| | | VISYDGSNKYYTDSVKGRFTISRDNS |
| | | KNTLYLQMNSLRTEDTAVYYCAKV |
| | | YYGSGIYYKKRYYYGMDVWGQGTT |
| | | VTVSSGGGGSGGGGSGGGGSSYELT |
| | | QPPSVSVALGQTARITCEGNNIGSQN |
| | | VHWYQQKPGQAPVLVMYRDSNRPS |
| | | GIPERFSGSKSGNTATLAISRAQAGDE |
| | | SDYYCQVWDGSAVVFGGGTKLTVL |
| 1108 | MPK20299-D6_SCFV | QVQLVESGGGVVQPGRSLRLSCAAS |
| | | GFTFSSYGMHWVRQAPGKGLEWVA |
| | | VISYDGSNKYYADSVKGRFTISRDNS |
| | | KNTLYLQMNSLRAEDTAVYFCARVY |
| | | YGSGIYYKKRYYYGMDVWGQGTTV |
| | | TVSSGGGGSGGGGSGGGGSSYELTQ |
| | | PLSVSVALGQTARITCEGNNIGSQNV |
| | | HWYQQKPGQAPVLVMYRDSNRPSGI |
| | | PERFSGSKSGNTATLAISRAQAGDES |
| | | DYYCQVWDGSAVVFGGGTQLTVL |
| 1109 | MPK20299-A4_SCFV | QVQLVESGGGVVQPGRSLRLSCAAS |
| | | GFTFSNYGFHWVRQTPGKGLEWVA |
| | | VISYDGSNRYYADSVKGRFTISRDNS |
| | | KNTLYLQMNSLRGEDTALYYCARV |
| | | YYGSGTYYKNRYYYGMDVWGQGT |
| | | TVTVSSGGGGSGGGGSGGGGSSYEL |
| | | TQPPSVSVALGQTARITCGGHNIGSK |
| | | GVHWYQQKPGQAPVLVIYRNSNRPS |
| | | GIPERFSGSNSGNTATLTISGTQAMDE |
| | | ADYYCQAWDSGTVVFGGGTQLTVL |
| 1110 | MPK20300-G5_SCFV | QVQLVESGGGVVQPGRSLRLSCAAS |
| | | GFTFSNYGFHWVRQTPGKGLEWVA |
| | | VISYDGSNRYYADSVKGRFTISRDNS |
| | | KNTLYLQMNSLRGEDTALYYCARV |
| | | YYGSGTYYKNRYYYGMDVWGQGT |
| | | TVTVSSGGGGSGGGGSGGGGSSYEL |
| | | TQPPSVSVALGQTARITCGANNIGSK |
| | | NVHWYQQKPGQPPVLVIYRDFNRPS |
| | | GIPERFSASNSGNTATLTISRGQAGDE |
| | | ADYYCQVWDSSTGNVVFGGGTKLT |
| | | VL |
| 1111 | MPK20299-C3_SCFV | QVQLVESGGGVVQPGRSLRLSCAAS |
| | | GFIFSNYGFHWVRQTPGKGLEWVAV |
| | | ISYDGSNKYYADSVKGRFTISRDNSK |
| | | NTLYLQMNSLRGEDTAVYYCARVY |
| | | YGSGSYYKNRYYYGMDVWGQGTT |
| | | VTVSSGGGGSGGGGSGGGGSSYELT |
| | | QPPSVSVAPGQTARITCGGNNIGSKN |
| | | VHWYQQKPGQAPVLVIYRDSNRPSG |
| | | IPERFSGSKSGTTATLTISRAQAGDEA |
| | | DYYCQVWDSSTVVFGGGTELTVL |
| 1112 | MPK20299-B7_SCFV | QVQLVESGGGVVQPGRSLRLSCAAS |
| | | GFNFSNYGMHWVRQAPGKGLEWVA |
| | | VISYDGSNRYYADSVKGRFTISRDNS |
| | | KNTLYLQMNSLRAEDTAVYFCARVY |
| | | YGSGIYYKKRYYYGMDVWGQGTTV |
| | | TVSSGGGGSGGGGSGGGGSSYELTQ |
| | | SSSVSVAPGQTARITCGGNNIGSKNV |
| | | HWYQQKPGQAPVLVIYRDSNRPSGIP |
| | | ERFSGSKSGTTATLTISRVEAGDEAD |
| | | YYCQVWDSSSAHVIFGGGTKLTVL |
| 1113 | MPK20299-A5_SCFV | QVQLVESGGGVVQPGRSLRLSCGAS |
| | | GFTFSGYGMHWVRQAPGKGLEWVA |
| | | VISYDGSNKYYADSVKGRFTISRDNS |
| | | KNTLYLQMNSLRGEDTAVYYCARV |
| | | YYGSGIYYKNRYYYGMDVWGQGTT |
| | | VTVSSGGGGSGGGGSGGGGSSYELT |
| | | QPPSGSVALGQTARITCGGNNLGSKN |
| | | VHWYQQKPGQAPVLVIYRNSNRPSG |
| | | IPERFSGSNSGNTATLTISRAQAGDEA |
| | | DYYCQVWDSSTVVFGGGTKLTVL |
| 1114 | MPK20299-D1_SCFV | QVQLVESGGGLVKPGGSLRLSCAAS |
| | | GFTFSNNGMHWVRQAPGKGLEWVA |
| | | VISYDGSNKYYADSVKGRFTISRDNS |
| | | KNTLYLQMNSLRAEDTAVYYCAKV |
| | | YYGSGIYYKNRYYYGMDVWGQGTT |
| | | VTVSSGGGGSGGGGSGGGGSSYELT |
| | | QPPSVSVALGQTARITCGGNRIGSKN |
| | | VHWYQQKPGQAPVLVIYRDSNRPSG |
| | | IPERFSGSKSGTTATLTISRAQAGDEA |
| | | EYYCQVWDSSTVVFGGGTKLTVL |
| 1115 | MPK20299-C5_SCFV | QVQLVESGGGVVQPGRSLRLSCAAS |
| | | GFTFSNYGFHWVRQTPGKGLEWVA |
| | | VISYDGSNRYYADSVKGRFTISRDNS |
| | | KNTLYLQMNSLRGEDTALYYCARV |
| | | YYGSGTYYKNRYYYGMDVWGQGT |
| | | TVTVSSGGGGSGGGGSGGGGSSYEL |
| | | TQLPSVSVALGQTARITCGGHNIGSK |
| | | GVHWYQQKPGQAPVLVIYRNSNRPS |
| | | GIPERFSGSNSGNTATLTISRAQAGDE |
| | | ADYYCQVWDSSTVVFGGGTELTVL |
| 1116 | MPK20299-B5_SCFV | QVQLVESGGGVVQPGRSLRLSCAAS |
| | | GFNFSNYGMHWVRQAPGKGLEWVA |
| | | VISYDGSNKYYADSVKGRFTISRDNS |
| | | KNTLYLQMNSLRAEDTAVYFCARVY |
| | | YGSGIYYKNRYYYGMDVWGQGTTV |
| | | TVSSGGGGSGGGGSGGGGSSYELTQ |
| | | PPSVSVALGQTARITCGGHNIGSKGV |
| | | HWYQQKPGQAPVLVIYRNSNRPSGIP |
| | | ERFSGSNSGNTATLTISRAQAGDEAD |
| | | YYCQVWDSSTVVFGGGTQLTVL |
| 1117 | MPK20299-G9_SCFV | QVQLVESGGDLVQPGRSLRLSCAAS |
| | | GFTFSNNGMHWVRQAPGKGLEWVA |
| | | VISNDGSNKYYADSVRGRFTISRDNS |
| | | KNTLYLQMNSLRAEDTAVYYCAKV |
| | | YYGSGIYYKNRYYYGMDVWGQGTT |
| | | VTVSSGGGGSGGGGSGGGGSSYELT |
| | | QPLSVSVALGQTARITCGGNNIGSKN |
| | | VHWYQQKPGQAPVLVIYRNSNRPSG |
| | | IPERFSGSNSGNTATLTLSRVQAGDE |
| | | ADYYCQVWDSSTVVFGGGTKLTVL |
| 1118 | MPK20299-G5_SCFV | QVQLVESGGGVVQPGRSLRLSCAVS |
| | | GFNFSNNGMHWVRQAPGKGLEWVA |
| | | VISNDGSNKYYADSVRGRFTISRDNS |
| | | KNTLYLQMDSLRTEDTAVYYCAKV |
| | | YYGSGIYYKNRYYYGMDVWGQGTT |
| | | VTVSSGGGGSGGGGSGGGGSSYELT |
| | | QPPSVSVALGQTARLTCEGNNIGSKN |
| | | VHWYQQKPGQAPVLVIYRDSNRPSG |
| | | IPERFSGSKSGNTATLAISRAQAGDES |
| | | DYYCQVWDSSAVVFGGGTKLTVL |
| 1119 | MPK20298-C10_SCFV | QVQLVESGGGVVQPGRSLRLSCAAS |
| | | GFTFSSSGMHWVRQAPGKGLEWVA |
| | | VISNDGSNKYYADSVRGRFTISRDNS |
| | | KNTLYLQMNSLRAEDTAVYYCAKV |
| | | YYGSGIYYKNNYYYGMDVWGQGTT |
| | | VTVSSGGGGSGGGGSGGGGSSYELT |
| | | QPPSVSVALGQTARITCGGNNIGSKN |
| | | VHWYQQKPGQAPVLAIYRNSNRPSG |
| | | IPERFTGSNSGNTATLTISGTQAMDE |
| | | ADYYCQAWDSSTVVFGGGTKLTVL |
| 1120 | MPK20298-B5_SCFV | QVQLVESGGGVVQPGRSLRLSCAAS |
| | | GFNFSNYGMHWVRQAPGKGLEWVA |
| | | VISYDGSNKYYADSVKGRFTISRDNS |
| | | KNTLYLQMNSLRAEDTAVYFCARVY |
| | | YGSGIYYKKRYYYGMDVWGQGTTV |
| | | TVSSGGGGSGGGGSGGGGSSYELTQ |
| | | PPSVSVALGQTARITCGGNNIGSQNV |
| | | HWYQQKPGQAPVLVIYRDSNRPSGIP |
| | | ERFSGSKSGNTATLAISRAQAGDESD |
| | | YYCQVWDSSAVVFGGGTQLTVL |
| 1121 | MPK20299-F2_SCFV | QVQLVESGGGVVQPGRSLRLSCAAS |
| | | GFTLSSSGMHWVRQAPGKGLEWVA |
| | | VISNDGSNKYYADSVKGRFTISRDDS |
| | | KNTLYLQMDSLRTEDTAVYYCAKV |
| | | YYGSGIYYKNRYYYGMDVWGQGTT |
| | | VTVSSGGGGSGGGGSGGGGSSYELT |
| | | QPPSVSVALGQTARISCGGNNIGSKN |
| | | VHWYQQKPGQAPVLVMYRDSNRPS |
| | | GIPERFSGSNSGNTATLTISGTQAMDE |
| | | ADYYCQAWDSGTVVFGGGTKLTVL |
| 1122 | MPK20298-D4_SCFV | QVQLVESGGGVVQPGRSLRLSCAAS |
| | | GFNFSNYGMHWVRQAPGKGLEWVA |
| | | VISYDGSNKYYADSVKGRFTISRDNS |
| | | KNTLYLQMNSLRAEDTAVYFCARVY |
| | | YGSGIYYKKRYYYGMDVWGQGTTV |
| | | TVSSGGGGSGGGGSGGGGSSYELTQ |
| | | PPSVSVALGQTARITCGGNNIGGKNV |
| | | HWYQQKPGQAPVLVIYRDSNRPSGIP |
| | | ERFSGSKSGNTATLTISRAQAGDESD |
| | | YYCQVWDSSTVVFGGGTQLTVL |
| 1123 | MPK20297-F5_SCFV | QVQLVESGGGVVQPGRSLRLSCVVS |
| | | GFNFSRNGMHWVRQVPGRGLDWVA |
| | | VISNDGSNKYYADSVKGRFTISRDNS |
| | | KNTLYLQMNSLRAEDTAVYYCAKV |
| | | YYGSGIYYKNNYYYGMDVWGQGTT |
| | | VTVSSGGGGSGGGGSGGGGSSYELT |
| | | QPLSVSVALGQTARITCGGNNIGSKN |
| | | VHWYQQKPGQAPVLVIYRNSNRPSG |
| | | IPERFSGSNSGNTATLTISRAQAGDEA |
| | | DYYCQVWDSSTVVFGGGTKLTVL |
| 1124 | MPK20299-D9_SCFV | QVQLVESGGGLVKPGGSLRLSCAAS |
| | | GFNFSRNGMHWVRQVPGRGLDWVA |
| | | VISNDGSNKYYADSVKGRFTISRDNS |
| | | KNTLYLQMNSLRAEDTAVYYCAKV |
| | | YYGSGIYYKNNYYYGMDVWGQGTT |
| | | VTVSSGGGGSGGGGSGGGGSSYELT |
| | | QPPSVSVALGQTARISCGGNNIESKN |
| | | VHWYQQKPGQAPVLVIYRDSNRPSG |
| | | IPERFSGSKSGTTATLTISRAQAGDEA |
| | | EYYCQVWDSSTVVFGGGTQLTVL |
| 1125 | huCCR8_32360_huIgG1z | EVQLVESGGGLVKPGGSLRLSCAAS |
| | mAb(LC:K38R)_HC | GFTFSNARMGWVRQAPGKGLEWVG |
| | | RIKSKTEGGTRDYAAPVKGRFTISRD |
| | | DSKNTLYLQMNSLKTEDTAVYYCTS |
| | | YSGVWGQGTMVTVSSASTKGPSVFP |
| | | LAPSSKSTSGGTAALGCLVKDYFPEP |
| | | VTVSWNSGALTSGVHTFPAVLQSSG |
| | | LYSLSSVVTVPSSSLGTQTYICNVNH |
| | | KPSNTKVDKKVEPKSCDKTHTCPPCP |
| | | APELLGGPSVFLFPPKPKDTLMISRTP |
| | | EVTCVVVDVSHEDPEVKFNWYVDG |
| | | VEVHNAKTKPREEQYNSTYRVVSVL |
| | | TVLHQDWLNGKEYKCKVSNKALPA |
| | | PIEKTISKAKGQPREPQVYTLPPSREE |
| | | MTKNQVSLTCLVKGFYPSDIAVEWE |
| | | SNGQPENNYKTTPPVLDSDGSFFLYS |
| | | KLTVDKSRWQQGNVFSCSVMHEAL |
| | | HNHYTQKSLSLSPGK |
| 1126 | huCCR8_32360_huIgG1z | DIVMTQSPDSLAVSLGERATINCKSS |
| | mAb(LC:K38R)_LC | QSVLYSSNNRNYLAWYHQKPGQSPK |
| | | LLISWASTRESGVPDRFSGSGSGTDFT |
| | | LTINSLQAEDVAVYYCQQYYSIPITFG |
| | | GGTKVEIKRTVAAPSVFIFPPSDEQLK |
| | | SGTASVVCLLNNFYPREAKVQWKVD |
| | | NALQSGNSQESVTEQDSKDSTYSLSS |
| | | TLTLSKADYEKHKVYACEVTHQGLS |
| | | SPVTKSFNRGEC |
| 1127 | anti- | QVQLVESGGGVVQPGRSLRLSCAAS |
| | huCCR8_44379(VH:D72S, VL:N67A_S68A_ | GFTFSNYGFHWVRQTPGKGLEWVA |
| | M99G_W109F_S111A)_huIgG1z (mAb)_HC | VISYDGSNRYYASSVKGRFTISRDNS |
| | | KNTLYLQMNSLRGEDTALYYCARV |
| | | YYGSGTYYKNRYYYGMDVWGQGT |
| | | TVTVSSASTKGPSVFPLAPSSKSTSGG |
| | | TAALGCLVKDYFPEPVTVSWNSGAL |
| | | TSGVHTFPAVLQSSGLYSLSSVVTVP |
| | | SSSLGTQTYICNVNHKPSNTKVDKKV |
| | | EPKSCDKTHTCPPCPAPELLGGPSVFL |
| | | FPPKPKDTLMISRTPEVTCVVVDVSH |
| | | EDPEVKFNWYVDGVEVHNAKTKPR |
| | | EEQYNSTYRVVSVLTVLHQDWLNG |
| | | KEYKCKVSNKALPAPIEKTISKAKGQ |
| | | PREPQVYTLPPSREEMTKNQVSLTCL |
| | | VKGFYPSDIAVEWESNGQPENNYKT |
| | | TPPVLDSDGSFFLYSKLTVDKSRWQQ |
| | | GNVFSCSVMHEALHNHYTQKSLSLS |
| | | PGK |
| 1128 | anti- | SYELTQPPSVSVALGQTARITCGGHN |
| | huCCR8_44379(VH:D72S, VL:N67A_S68A_ | IGSKGVHWYQQKPGQAPVLVIYRAA |
| | M99G_W109F_S111A)_huIgG1z (mAb)_LC | NRPSGIPERFSGSNSGNTATLTISGTQ |
| | | AGDEADYYCQAFDAGTVVFGGGTQ |
| | | LTVLGQPKAAPSVTLFPPSSEELQAN |
| | | KATLVCLISDFYPGAVTVAWKADSS |
| | | PVKAGVETTTPSKQSNNKYAASSYLS |
| | | LTPEQWKSHRSYSCQVTHEGSTVEK |
| | | TVAPTECS |
| 1129 | anti- | QVQLVESGGGVVQPGRSLRLSCAAS |
| | huCCR8_44379(VH:D61A_D72A, VL:N67Q_ | GFTFSNYGFHWVRQTPGKGLEWVA |
| | M99E_W109F_S111A)_huIgG1z | VISYAGSNRYYAASVKGRFTISRDNS |
| | (mAb)_HC | KNTLYLQMNSLRGEDTALYYCARV |
| | | YYGSGTYYKNRYYYGMDVWGQGT |
| | | TVTVSSASTKGPSVFPLAPSSKSTSGG |
| | | TAALGCLVKDYFPEPVTVSWNSGAL |
| | | TSGVHTFPAVLQSSGLYSLSSVVTVP |
| | | SSSLGTQTYICNVNHKPSNTKVDKKV |
| | | EPKSCDKTHTCPPCPAPELLGGPSVFL |
| | | FPPKPKDTLMISRTPEVTCVVVDVSH |
| | | EDPEVKFNWYVDGVEVHNAKTKPR |
| | | EEQYNSTYRVVSVLTVLHQDWLNG |
| | | KEYKCKVSNKALPAPIEKTISKAKGQ |
| | | PREPQVYTLPPSREEMTKNQVSLTCL |
| | | VKGFYPSDIAVEWESNGQPENNYKT |
| | | TPPVLDSDGSFFLYSKLTVDKSRWQQ |
| | | GNVFSCSVMHEALHNHYTQKSLSLS |
| | | PGK |
| 1130 | anti- | SYELTQPPSVSVALGQTARITCGGHN |
| | huCCR8_44379(VH:D61A_D72A, VL:N67Q_ | IGSKGVHWYQQKPGQAPVLVIYRQS |
| | M99E_W109F_S111A)_huIgG1z | NRPSGIPERFSGSNSGNTATLTISGTQ |
| | (mAb)_LC | AEDEADYYCQAFDAGTVVFGGGTQ |
| | | LTVLGQPKAAPSVTLFPPSSEELQAN |
| | | KATLVCLISDFYPGAVTVAWKADSS |
| | | PVKAGVETTTPSKQSNNKYAASSYLS |
| | | LTPEQWKSHRSYSCQVTHEGSTVEK |
| | | TVAPTECS |
| 1131 | anti- | QVQLVESGGGVVQPGRSLRLSCAAS |
| | huCCR8_44379(VH:D61S, VL:N67Q_M99G_ | GFTFSNYGFHWVRQTPGKGLEWVA |
| | W109F_S111A)_huIgG1z (mAb)_HC | VISYSGSNRYYADSVKGRFTISRDNS |
| | | KNTLYLQMNSLRGEDTALYYCARV |
| | | YYGSGTYYKNRYYYGMDVWGQGT |
| | | TVTVSSASTKGPSVFPLAPSSKSTSGG |
| | | TAALGCLVKDYFPEPVTVSWNSGAL |
| | | TSGVHTFPAVLQSSGLYSLSSVVTVP |
| | | SSSLGTQTYICNVNHKPSNTKVDKKV |
| | | EPKSCDKTHTCPPCPAPELLGGPSVFL |
| | | FPPKPKDTLMISRTPEVTCVVVDVSH |
| | | EDPEVKFNWYVDGVEVHNAKTKPR |
| | | EEQYNSTYRVVSVLTVLHQDWLNG |
| | | KEYKCKVSNKALPAPIEKTISKAKGQ |
| | | PREPQVYTLPPSREEMTKNQVSLTCL |
| | | VKGFYPSDIAVEWESNGQPENNYKT |
| | | TPPVLDSDGSFFLYSKLTVDKSRWQQ |
| | | GNVFSCSVMHEALHNHYTQKSLSLS |
| | | PGK |
| 1132 | anti- | SYELTQPPSVSVALGQTARITCGGHN |
| | huCCR8_44379(VH:D61S, VL:N67Q_M99G_ | IGSKGVHWYQQKPGQAPVLVIYRQS |
| | W109F_S111A)_huIgG1z (mAb)_LC | NRPSGIPERFSGSNSGNTATLTISGTQ |
| | | AGDEADYYCQAFDAGTVVFGGGTQ |
| | | LTVLGQPKAAPSVTLFPPSSEELQAN |
| | | KATLVCLISDFYPGAVTVAWKADSS |
| | | PVKAGVETTTPSKQSNNKYAASSYLS |
| | | LTPEQWKSHRSYSCQVTHEGSTVEK |
| | | TVAPTECS |
| 1133 | Hu anti-huCCR8 LIBC315615-1 HuIgG1z | SYELTQPLSVSVALGQTARITCGGHN |
| | mAb_LC | IGSKGVHWYQQKPGQAPVLVIYRNS |
| | | NRPSGIPERFSGSNSGNTATLTISRAQ |
| | | AGDEADYYCQVWDISTVVFGGGTEL |
| | | TVLGQPKAAPSVTLFPPSSEELQANK |
| | | ATLVCLISDFYPGAVTVAWKADSSP |
| | | VKAGVETTTPSKQSNNKYAASSYLS |
| | | LTPEQWKSHRSYSCQVTHEGSTVEK |
| | | TVAPTECS |
| 1134 | Hu anti-huCCR8 LIBC315615-1 HuIgG1z | QVQLVESGGGVAQPGRSLRLSCAAS |
| | mAb_HC | GFNFSNCGMHWVRQAPGKGLEWVA |
| | | VISYDGGNKYHADSVKGRFTISRDDS |
| | | KNTLYLQMDSLRTEDTAVYYCAKV |
| | | YYGSGIYYKNRYYYGMDVWGQGTT |
| | | VTVSSASTKGPSVFPLAPSSKSTSGGT |
| | | AALGCLVKDYFPEPVTVSWNSGALT |
| | | SGVHTFPAVLQSSGLYSLSSVVTVPS |
| | | SSLGTQTYICNVNHKPSNTKVDKKV |
| | | EPKSCDKTHTCPPCPAPELLGGPSVFL |
| | | FPPKPKDTLMISRTPEVTCVVVDVSH |
| | | EDPEVKFNWYVDGVEVHNAKTKPR |
| | | EEQYNSTYRVVSVLTVLHQDWLNG |
| | | KEYKCKVSNKALPAPIEKTISKAKGQ |
| | | PREPQVYTLPPSREEMTKNQVSLTCL |
| | | VKGFYPSDIAVEWESNGQPENNYKT |
| | | TPPVLDSDGSFFLYSKLTVDKSRWQQ |
| | | GNVFSCSVMHEALHNHYTQKSLSLS |
| | | PGK |
| 1135 | Hu anti-huCCR8 LIBC317152-1 HuIgG1z | SYELTQPLSVSVALGQTARITCGGHN |
| | mAb_LC | IGSKGVHWYQQKPGQAPVLVIYRNS |
| | | NRPSGIPERFSGSNSGKTATLTISRAQ |
| | | AGDEADYYCQVWDSSTVVFGGGTE |
| | | LTVLGQPKAAPSVTLFPPSSEELQAN |
| | | KATLVCLISDFYPGAVTVAWKADSS |
| | | PVKAGVETTTPSKQSNNKYAASSYLS |
| | | LTPEQWKSHRSYSCQVTHEGSTVEK |
| | | TVAPTECS |
| 1136 | Hu anti-huCCR8 LIBC317152-1 HuIgG1z | QVQLVESGGGVAQPGRSLRLSCAAS |
| | mAb_HC | GFNFSNCGMHWVRQAPGKGLEWVA |
| | | VISYDGGNKYYADSVKGRFTISRDDS |
| | | KNTLYLQMDSLRTEDTAVYYCAKV |
| | | YYGSGIYYKNRYYYGMDVWGQGTT |
| | | VTVSSASTKGPSVFPLAPSSKSTSGGT |
| | | AALGCLVKDYFPEPVTVSWNSGALT |
| | | SGVHTFPAVLQSSGLYSLSSVVTVPS |
| | | SSLGTQTYICNVNHKPSNTKVDKKV |
| | | EPKSCDKTHTCPPCPAPELLGGPSVFL |
| | | FPPKPKDTLMISRTPEVTCVVVDVSH |
| | | EDPEVKFNWYVDGVEVHNAKTKPR |
| | | EEQYNSTYRVVSVLTVLHQDWLNG |
| | | KEYKCKVSNKALPAPIEKTISKAKGQ |
| | | PREPQVYTLPPSREEMTKNQVSLTCL |
| | | VKGFYPSDIAVEWESNGQPENNYKT |
| | | TPPVLDSDGSFFLYSKLTVDKSRWQQ |
| | | GNVFSCSVMHEALHNHYTQKSLSLS |
| | | PGK |
| 1137 | Hu anti-huCCR8 LIBC317471-1 HuIgG1z | SYELTQPLSVSVALGQTARITCGGNN |
| | mAb_LC | IGSKNVHWYQKRPGQAPVLVIYRDS |
| | | NRPSGIPERFSGSKSGNTATLTISRAQ |
| | | AGDEADYYCQVWDSNTVVFGGGTN |
| | | LTVLGQPKAAPSVTLFPPSSEELQAN |
| | | KATLVCLISDFYPGAVTVAWKADSS |
| | | PVKAGVETTTPSKQSNNKYAASSYLS |
| | | LTPEQWKSHRSYSCQVTHEGSTVEK |
| | | TVAPTECS |
| 1138 | Hu anti-huCCR8 LIBC317471-1 HuIgG1z | QVQLVESGGGVVQPGRSLRLSCVVS |
| | mAb_HC | GFNFSNNGMHWVRQAPGKGLEWVA |
| | | VISNDGSNKYYADSVRGRFTISRDNS |
| | | KNTLYLQMNSLRAEDTAVYSCAKV |
| | | YYGSGIYYKNNYYYGMDVWGQGTT |
| | | VTVSSASTKGPSVFPLAPSSKSTSGGT |
| | | AALGCLVKDYFPEPVTVSWNSGALT |
| | | SGVHTFPAVLQSSGLYSLSSVVTVPS |
| | | SSLGTQTYICNVNHKPSNTKVDKKV |
| | | EPKSCDKTHTCPPCPAPELLGGPSVFL |
| | | FPPKPKDTLMISRTPEVTCVVVDVSH |
| | | EDPEVKFNWYVDGVEVHNAKTKPR |
| | | EEQYNSTYRVVSVLTVLHQDWLNG |
| | | KEYKCKVSNKALPAPIEKTISKAKGQ |
| | | PREPQVYTLPPSREEMTKNQVSLTCL |
| | | VKGFYPSDIAVEWESNGQPENNYKT |
| | | TPPVLDSDGSFFLYSKLTVDKSRWQQ |
| | | GNVFSCSVMHEALHNHYTQKSLSLS |
| | | PGK |
| 1139 | Hu anti-huCCR8 LIBC317977-1 HuIgG1z | SYELTQPLSVSVALGQTARITCGGNN |
| | mAb_LC | IGSKNVHWYQQKAGQAPVQVIYRNS |
| | | NRPSGIPERFSGSNSGNTATLTISRAQ |
| | | AGDEADYYCQVWDSSTVVFGGGTK |
| | | LTVLGQPKAAPSVTLFPPSSEELQAN |
| | | KATLVCLISDFYPGAVTVAWKADSS |
| | | PVKAGVETTTPSKQSNNKYAASSYLS |
| | | LTPEQWKSHRSYSCQVTHEGSTVEK |
| | | TVAPTECS |
| 1140 | Hu anti-huCCR8 LIBC317977-1 HuIgG1z | QVQLVESGGGVVQPGRSLRLSCAAS |
| | mAb_HC | GFNFNTYGMHWVRQAPGKGLEWVA |
| | | VISYDGSNKYYADSVKGRFTISRDNS |
| | | KSTLYLQMNSLRAEDTAVYYCARVY |
| | | YGSGSYYKKNYYYGMDVWGQGTT |
| | | VTVSSASTKGPSVFPLAPSSKSTSGGT |
| | | AALGCLVKDYFPEPVTVSWNSGALT |
| | | SGVHTFPAVLQSSGLYSLSSVVTVPS |
| | | SSLGTQTYICNVNHKPSNTKVDKKV |
| | | EPKSCDKTHTCPPCPAPELLGGPSVFL |
| | | FPPKPKDTLMISRTPEVTCVVVDVSH |
| | | EDPEVKFNWYVDGVEVHNAKTKPR |
| | | EEQYNSTYRVVSVLTVLHQDWLNG |
| | | KEYKCKVSNKALPAPIEKTISKAKGQ |
| | | PREPQVYTLPPSREEMTKNQVSLTCL |
| | | VKGFYPSDIAVEWESNGQPENNYKT |
| | | TPPVLDSDGSFFLYSKLTVDKSRWQQ |
| | | GNVFSCSVMHEALHNHYTQKSLSLS |
| | | PGK |
| 1141 | Hu anti-huCCR8 LIBC318774-1 HuIgG1z | SYELTQPLSVSVALGQTARITCGGNN |
| | mAb_LC | IGGKNVHWYQQKPGQAPVLVIYRDS |
| | | NRPSGIPERFSGSKSGNTATLTISRAQ |
| | | AGDESDYYCQVWDSSTVVFGGGTTL |
| | | TVLGQPKAAPSVTLFPPSSEELQANK |
| | | ATLVCLISDFYPGAVTVAWKADSSP |
| | | VKAGVETTTPSKQSNNKYAASSYLS |
| | | LTPEQWKSHRSYSCQVTHEGSTVEK |
| | | TVAPTECS |
| 1142 | Hu anti-huCCR8 LIBC318774-1 HuIgG1z | QVQVVESGGGVVQPGRSLRLSCAAS |
| | mAb_HC | GFTLSSYGFHWVRQTPGKGLEWVAV |
| | | ISYDGSNKYYADSVKGRFTISRDNSK |
| | | NTLYLQMNSLRGEDTAVYYCARVY |
| | | YGSGTYYKNRYYYGMDVWGQGTT |
| | | VTVSSASTKGPSVFPLAPSSKSTSGGT |
| | | AALGCLVKDYFPEPVTVSWNSGALT |
| | | SGVHTFPAVLQSSGLYSLSSVVTVPS |
| | | SSLGTQTYICNVNHKPSNTKVDKKV |
| | | EPKSCDKTHTCPPCPAPELLGGPSVFL |
| | | FPPKPKDTLMISRTPEVTCVVVDVSH |
| | | EDPEVKFNWYVDGVEVHNAKTKPR |
| | | EEQYNSTYRVVSVLTVLHQDWLNG |
| | | KEYKCKVSNKALPAPIEKTISKAKGQ |
| | | PREPQVYTLPPSREEMTKNQVSLTCL |
| | | VKGFYPSDIAVEWESNGQPENNYKT |
| | | TPPVLDSDGSFFLYSKLTVDKSRWQQ |
| | | GNVFSCSVMHEALHNHYTQKSLSLS |
| | | PGK |
| 1143 | Hu anti-huCCR8 LIBC319840-1 HuIgG1z | SYELTQPLSVSEALGQTARITCGGNNI |
| | mAb_LC | GSKNVHWYQQKPGQAPVLVIYRDSN |
| | | RPSGIPERFSGSKSGNTATLTISRAQA |
| | | GDEADYYCQVWDSSTVVFGGGTKV |
| | | TVLGQPKAAPSVTLFPPSSEELQANK |
| | | ATLVCLISDFYPGAVTVAWKADSSP |
| | | VKAGVETTTPSKQSNNKYAASSYLS |
| | | LTPEQWKSHRSYSCQVTHEGSTVEK |
| | | TVAPTECS |
| 1144 | Hu anti-huCCR8 LIBC319840-1 HuIgG1z | QVQLVESGGGVVQPGRSLRLSCVVS |
| | mAb_HC | GFNFINNGMHWVRQAPGKGLDWVA |
| | | VISNDGSNKYYPDSVKGRFTISRDNS |
| | | KNTLYLQMNSLRAEDSAVYYCAKV |
| | | YYGSGNYYKNNYYYGMDVWGQGT |
| | | TVTVSSASTKGPSVFPLAPSSKSTSGG |
| | | TAALGCLVKDYFPEPVTVSWNSGAL |
| | | TSGVHTFPAVLQSSGLYSLSSVVTVP |
| | | SSSLGTQTYICNVNHKPSNTKVDKKV |
| | | EPKSCDKTHTCPPCPAPELLGGPSVFL |
| | | FPPKPKDTLMISRTPEVTCVVVDVSH |
| | | EDPEVKFNWYVDGVEVHNAKTKPR |
| | | EEQYNSTYRVVSVLTVLHQDWLNG |
| | | KEYKCKVSNKALPAPIEKTISKAKGQ |
| | | PREPQVYTLPPSREEMTKNQVSLTCL |
| | | VKGFYPSDIAVEWESNGQPENNYKT |
| | | TPPVLDSDGSFFLYSKLTVDKSRWQQ |
| | | GNVFSCSVMHEALHNHYTQKSLSLS |
| | | PGK |
| 1145 | Hu anti-huCCR8 LIBC320212-1 HuIgG1z | SYELTQPLSVSVALGQTARITCEGNNI |
| | mAb_LC | GSQNVHWYQQKPGQAPVLVMYRDS |
| | | NRPSGIPERFSGSKSGNTATLAISRAQ |
| | | AGDESDYYCQVWDGSAVVFGGGTT |
| | | LTVLGQPKAAPSVTLFPPSSEELQAN |
| | | KATLVCLISDFYPGAVTVAWKADSS |
| | | PVKAGVETTTPSKQSNNKYAASSYLS |
| | | LTPEQWKSHRSYSCQVTHEGSTVEK |
| | | TVAPTECS |
| 1146 | Hu anti-huCCR8 LIBC320212-1 HuIgG1z | QMQVVESGGGVVQPGRSLRLSCAAS |
| | mAb_HC | GFTFSSSGMHWVRQAPGKGLEWVA |
| | | VISHDGSNKYYADSVKGRFTISRDNS |
| | | KNTLYLQMNSLGGEDTAVYYCAKV |
| | | YYGSGIYYKNRYYYGMDVWGQGTT |
| | | VIVSSASTKGPSVFPLAPSSKSTSGGT |
| | | AALGCLVKDYFPEPVTVSWNSGALT |
| | | SGVHTFPAVLQSSGLYSLSSVVTVPS |
| | | SSLGTQTYICNVNHKPSNTKVDKKV |
| | | EPKSCDKTHTCPPCPAPELLGGPSVFL |
| | | FPPKPKDTLMISRTPEVTCVVVDVSH |
| | | EDPEVKFNWYVDGVEVHNAKTKPR |
| | | EEQYNSTYRVVSVLTVLHQDWLNG |
| | | KEYKCKVSNKALPAPIEKTISKAKGQ |
| | | PREPQVYTLPPSREEMTKNQVSLTCL |
| | | VKGFYPSDIAVEWESNGQPENNYKT |
| | | TPPVLDSDGSFFLYSKLTVDKSRWQQ |
| | | GNVFSCSVMHEALHNHYTQKSLSLS |
| | | PGK |
| 1147 | Hu anti-huCCR8 LIBC320384-1 HuIgG1z | SYELTQPLSVSVALGQTARITCGGHN |
| | mAb_LC | IGSKGVHWYQQKPGQAPVLVIYRNS |
| | | NRPSGIPERFSGSNSGNTATLTISRAQ |
| | | AGDEADYYCQVWDSSTVVFGGGTE |
| | | LTVLGQPKAAPSVTLFPPSSEELQAN |
| | | KATLVCLISDFYPGAVTVAWKADSS |
| | | PVKAGVETTTPSKQSNNKYAASSYLS |
| | | LTPEQWKSHRSYSCQVTHEGSTVEK |
| | | TVAPTECS |
| 1148 | Hu anti-huCCR8 LIBC320384-1 HuIgG1z | QVQLVESGGGVAQPGRSLRLSCAAS |
| | mAb_HC | GFNFSDCGMHWVRQAPGKGLEWVA |
| | | VISYDGGNKYYADSVKGRFTISRDDS |
| | | KNTLYLQTDSLRTEDTAVYYCAKVY |
| | | YGSGIYYKNRYYYGMDVWGQGTTV |
| | | TVSSASTKGPSVFPLAPSSKSTSGGTA |
| | | ALGCLVKDYFPEPVTVSWNSGALTS |
| | | GVHTFPAVLQSSGLYSLSSVVTVPSS |
| | | SLGTQTYICNVNHKPSNTKVDKKVE |
| | | PKSCDKTHTCPPCPAPELLGGPSVFLF |
| | | PPKPKDTLMISRTPEVTCVVVDVSHE |
| | | DPEVKFNWYVDGVEVHNAKTKPRE |
| | | EQYNSTYRVVSVLTVLHQDWLNGK |
| | | EYKCKVSNKALPAPIEKTISKAKGQP |
| | | REPQVYTLPPSREEMTKNQVSLTCLV |
| | | KGFYPSDIAVEWESNGQPENNYKTTP |
| | | PVLDSDGSFFLYSKLTVDKSRWQQG |
| | | NVFSCSVMHEALHNHYTQKSLSLSP |
| | | GK |
| 1149 | Hu anti-huCCR8 LIBC320689-1 HuIgG1z | SYELTQPLSVSVALGQTGRITCGGNN |
| | mAb_LC | IGSKNVHWYQQKPGQAPVLVIYRSS |
| | | NRPSGIPERFSGSNSGNTATLTISRAQ |
| | | AGDESDYYCQIWDSSTVVFGGGTKL |
| | | TVLGQPKAAPSVTLFPPSSEELQANK |
| | | ATLVCLISDFYPGAVTVAWKADSSP |
| | | VKAGVETTTPSKQSNNKYAASSYLS |
| | | LTPEQWKSHRSYSCQVTHEGSTVEK |
| | | TVAPTECS |
| 1150 | Hu anti-huCCR8 LIBC320689-1 HuIgG1z | QVQVVESGGGVVQPGRSLRLSCAAS |
| | mAb_HC | GFTFSSYGMHWVRQAPGKGLEWVA |
| | | VISFDGNNKYYADSVKGRFTISRDNS |
| | | KNTLYLQMNSLRGEDTAVYYCARV |
| | | YYGSGSYYKNRYYYGMDVWGQGT |
| | | TVTVSTASTKGPSVFPLAPSSKSTSGG |
| | | TAALGCLVKDYFPEPVTVSWNSGAL |
| | | TSGVHTFPAVLQSSGLYSLSSVVTVP |
| | | SSSLGTQTYICNVNHKPSNTKVDKKV |
| | | EPKSCDKTHTCPPCPAPELLGGPSVFL |
| | | FPPKPKDTLMISRTPEVTCVVVDVSH |
| | | EDPEVKFNWYVDGVEVHNAKTKPR |
| | | EEQYNSTYRVVSVLTVLHQDWLNG |
| | | KEYKCKVSNKALPAPIEKTISKAKGQ |
| | | PREPQVYTLPPSREEMTKNQVSLTCL |
| | | VKGFYPSDIAVEWESNGQPENNYKT |
| | | TPPVLDSDGSFFLYSKLTVDKSRWQQ |
| | | GNVFSCSVMHEALHNHYTQKSLSLS |
| | | PGK |
| 1151 | Hu anti-huCCR8 LIBC321408-1 HuIgG1z | SYELTQPLSVSVALGQTARITCGGNN |
| | mAb_LC | IGSKNVHWYQQRPGQAPVLVIYRDS |
| | | NRPSGIPERLSGSKAGNTATLTISRAH |
| | | AGDEADYYCQVWDSSTVVFGGGTE |
| | | LTVQGQPKAAPSVTLFPPSSEELQAN |
| | | KATLVCLISDFYPGAVTVAWKADSS |
| | | PVKAGVETTTPSKQSNNKYAASSYLS |
| | | LTPEQWKSHRSYSCQVTHEGSTVEK |
| | | TVAPTECS |
| 1152 | Hu anti-huCCR8 LIBC321408-1 HuIgG1z | QVQLVESGGGVVQPGRSLRLSCAVS |
| | mAb_HC | GFTFSSNGMHWVRQAPGKGLEWVA |
| | | VISNDGSNKYYGDSVKGRFTISRDNS |
| | | KNTLYLQMNSLRAEDTAVYYCAKV |
| | | YYGSGIYYRNNYYYGMDVWGQGTT |
| | | VTVSSASTKGPSVFPLAPSSKSTSGGT |
| | | AALGCLVKDYFPEPVTVSWNSGALT |
| | | SGVHTFPAVLQSSGLYSLSSVVTVPS |
| | | SSLGTQTYICNVNHKPSNTKVDKKV |
| | | EPKSCDKTHTCPPCPAPELLGGPSVFL |
| | | FPPKPKDTLMISRTPEVTCVVVDVSH |
| | | EDPEVKFNWYVDGVEVHNAKTKPR |
| | | EEQYNSTYRVVSVLTVLHQDWLNG |
| | | KEYKCKVSNKALPAPIEKTISKAKGQ |
| | | PREPQVYTLPPSREEMTKNQVSLTCL |
| | | VKGFYPSDIAVEWESNGQPENNYKT |
| | | TPPVLDSDGSFFLYSKLTVDKSRWQQ |
| | | GNVFSCSVMHEALHNHYTQKSLSLS |
| | | PGK |
| 1153 | Hu anti-huCCR8 LIBC321824-1 HuIgG1z | SYELTQPLSVSVALGQTARITCGGNN |
| | mAb_LC | IGSKNVHWYQQKPGQAPILVIYRNTN |
| | | RPSGIPERFSGSNSGNTATLTISRAQV |
| | | GDESDYFCQVWDSSTVVFGGGTKLT |
| | | VLGQPKAAPSVTLFPPSSEELQANKA |
| | | TLVCLISDFYPGAVTVAWKADSSPV |
| | | KAGVETTTPSKQSNNKYAASSYLSLT |
| | | PEQWKSHRSYSCQVTHEGSTVEKTV |
| | | APTECS |
| 1154 | Hu anti-huCCR8 LIBC321824-1 HuIgG1z | QVQVVESGGGVVQPGRSLRLSCGAS |
| | mAb_HC | GFTFSGYGMHWVRQAPGKGLEWVA |
| | | VISYDGSNKYYADSVKGRFPISRDNS |
| | | KNTLYLQMNSLRGEDTAVYYCARV |
| | | YYGSGIYYKNRYYYGMDVWGQGTT |
| | | VAVSSASTKGPSVFPLAPSSKSTSGGT |
| | | AALGCLVKDYFPEPVTVSWNSGALT |
| | | SGVHTFPAVLQSSGLYSLSSVVTVPS |
| | | SSLGTQTYICNVNHKPSNTKVDKKV |
| | | EPKSCDKTHTCPPCPAPELLGGPSVFL |
| | | FPPKPKDTLMISRTPEVTCVVVDVSH |
| | | EDPEVKFNWYVDGVEVHNAKTKPR |
| | | EEQYNSTYRVVSVLTVLHQDWLNG |
| | | KEYKCKVSNKALPAPIEKTISKAKGQ |
| | | PREPQVYTLPPSREEMTKNQVSLTCL |
| | | VKGFYPSDIAVEWESNGQPENNYKT |
| | | TPPVLDSDGSFFLYSKLTVDKSRWQQ |
| | | GNVFSCSVMHEALHNHYTQKSLSLS |
| | | PGK |
| 1155 | Hu anti-huCCR8 LIBC321845-1 HuIgG1z | SYELTQPLSVSVALGQTARITCGGNN |
| | mAb_LC | IGSKNVHWYQQKPGQAPILVIYRNTN |
| | | RPSGIPERFSGSNSGNTATLTISRAQV |
| | | GDESDYFCQVWDSSTVVFGGGTKLT |
| | | VLGQPKAAPSVTLFPPSSEELQANKA |
| | | TLVCLISDFYPGAVTVAWKADSSPV |
| | | KAGVETTTPSKQSNNKYAASSYLSLT |
| | | PEQWKSHRSYSCQVTHEGSTVEKTV |
| | | APTECS |
| 1156 | Hu anti-huCCR8 LIBC321845-1 HuIgG1z | QVQVVESGGGVVQPGRSLRLSCGAS |
| | mAb_HC | GFTFSGYGMHWVRQAPGKGLEWVA |
| | | VISYDGSNKYYADSVKGRFTISRDNS |
| | | KNTLYLQMNSLRGEDTAVYYCARV |
| | | YYGSGIYYKNRYYYGMDVWGQGTT |
| | | VAVSSASTKGPSVFPLAPSSKSTSGGT |
| | | AALGCLVKDYFPEPVTVSWNSGALT |
| | | SGVHTFPAVLQSSGLYSLSSVVTVPS |
| | | SSLGTQTYICNVNHKPSNTKVDKKV |
| | | EPKSCDKTHTCPPCPAPELLGGPSVFL |
| | | FPPKPKDTLMISRTPEVTCVVVDVSH |
| | | EDPEVKFNWYVDGVEVHNAKTKPR |
| | | EEQYNSTYRVVSVLTVLHQDWLNG |
| | | KEYKCKVSNKALPAPIEKTISKAKGQ |
| | | PREPQVYTLPPSREEMTKNQVSLTCL |
| | | VKGFYPSDIAVEWESNGQPENNYKT |
| | | TPPVLDSDGSFFLYSKLTVDKSRWQQ |
| | | GNVFSCSVMHEALHNHYTQKSLSLS |
| | | PGK |
| 1157 | Hu anti-huCCR8 LIBC322176-1 HuIgG1z | SYDLTQPLSVSVALGQTARITCGGNN |
| | mAb_LC | IGDKNVHWYQQKPGQAPVLVIYRNN |
| | | VRPSGIPERFSGSNSGNTATLTISRAQ |
| | | AGDEADYYCQVWDSSTVVFGGGTK |
| | | LTVLGQPKAAPSVTLFPPSSEELQAN |
| | | KATLVCLISDFYPGAVTVAWKADSS |
| | | PVKAGVETTTPSKQSNNKYAASSYLS |
| | | LTPEQWKSHRSYSCQVTHEGSTVEK |
| | | TVAPTECS |
| 1158 | Hu anti-huCCR8 LIBC322176-1 HuIgG1z | QVQLVESGGGVVQPGRSLRLSCAAS |
| | mAb_HC | GLNFSNFGMHWVRQAPGKGLDWVA |
| | | VISYDGGNKYYADSVKGRFTVSRDN |
| | | SKNTLFLQMNSLRAEDTALYYCAKV |
| | | YYGSGSYYKKRYYYGMDVWGQGT |
| | | TVTVSSASTKGPSVFPLAPSSKSTSGG |
| | | TAALGCLVKDYFPEPVTVSWNSGAL |
| | | TSGVHTFPAVLQSSGLYSLSSVVTVP |
| | | SSSLGTQTYICNVNHKPSNTKVDKKV |
| | | EPKSCDKTHTCPPCPAPELLGGPSVFL |
| | | FPPKPKDTLMISRTPEVTCVVVDVSH |
| | | EDPEVKFNWYVDGVEVHNAKTKPR |
| | | EEQYNSTYRVVSVLTVLHQDWLNG |
| | | KEYKCKVSNKALPAPIEKTISKAKGQ |
| | | PREPQVYTLPPSREEMTKNQVSLTCL |
| | | VKGFYPSDIAVEWESNGQPENNYKT |
| | | TPPVLDSDGSFFLYSKLTVDKSRWQQ |
| | | GNVFSCSVMHEALHNHYTQKSLSLS |
| | | PGK |
| 1159 | Hu anti-huCCR8 LIBC323412-1 HuIgG1z | SYELTQPLSVSVALGQTARITCGGNN |
| | mAb_LC | IGSKNVHWYQQKPGQAPVLVIYRDS |
| | | NRPSGIPERFSGSKSGNTATLTISRAQ |
| | | AGDEADYYCQVWDSSTVVFGGGAK |
| | | LTVLGQPKAAPSVTLFPPSSEELQAN |
| | | KATLVCLISDFYPGAVTVAWKADSS |
| | | PVKAGVETTTPSKQSNNKYAASSYLS |
| | | LTPEQWKSHRSYSCQVTHEGSTVEK |
| | | TVAPTECS |
| 1160 | Hu anti-huCCR8 LIBC323412-1 HuIgG1z | QVQLVESGGGVVQPGRSLRLSCAAS |
| | mAb_HC | GFNFSSCGMHWVRQAPGKGLEWVA |
| | | VISYDGTNKYYADSVKGRFTISRDNS |
| | | KNTLYLQMNSLRAEDTAVYYCAKV |
| | | YYGSGIYYKKNYYYGMDVWGQGTT |
| | | VTVSSASTKGPSVFPLAPSSKSTSGGT |
| | | AALGCLVKDYFPEPVTVSWNSGALT |
| | | SGVHTFPAVLQSSGLYSLSSVVTVPS |
| | | SSLGTQTYICNVNHKPSNTKVDKKV |
| | | EPKSCDKTHTCPPCPAPELLGGPSVFL |
| | | FPPKPKDTLMISRTPEVTCVVVDVSH |
| | | EDPEVKFNWYVDGVEVHNAKTKPR |
| | | EEQYNSTYRVVSVLTVLHQDWLNG |
| | | KEYKCKVSNKALPAPIEKTISKAKGQ |
| | | PREPQVYTLPPSREEMTKNQVSLTCL |
| | | VKGFYPSDIAVEWESNGQPENNYKT |
| | | TPPVLDSDGSFFLYSKLTVDKSRWQQ |
| | | GNVFSCSVMHEALHNHYTQKSLSLS |
| | | PGK |
| 1161 | huCCR8_32360_huIgG1z mAb_HC | EVQLVESGGGLVKPGGSLRLSCAAS |
| | | GFTFSNARMGWVRQAPGKGLEWVG |
| | | RIKSKTEGGTRDYAAPVKGRFTISRD |
| | | DSKNTLYLQMNSLKTEDTAVYYCTS |
| | | YSGVWGQGTMVTVSSASTKGPSVFP |
| | | LAPSSKSTSGGTAALGCLVKDYFPEP |
| | | VTVSWNSGALTSGVHTFPAVLQSSG |
| | | LYSLSSVVTVPSSSLGTQTYICNVNH |
| | | KPSNTKVDKKVEPKSCDKTHTCPPCP |
| | | APELLGGPSVFLFPPKPKDTLMISRTP |
| | | EVTCVVVDVSHEDPEVKFNWYVDG |
| | | VEVHNAKTKPREEQYNSTYRVVSVL |
| | | TVLHQDWLNGKEYKCKVSNKALPA |
| | | PIEKTISKAKGQPREPQVYTLPPSREE |
| | | MTKNQVSLTCLVKGFYPSDIAVEWE |
| | | SNGQPENNYKTTPPVLDSDGSFFLYS |
| | | KLTVDKSRWQQGNVFSCSVMHEAL |
| | | HNHYTQKSLSLSPGK |
| 1162 | huCCR8_32360_huIgG1z mAb_LC | DIVMTQSPDSLAVSLGERATINCKSS |
| | | QSVLYSSNNKNYLAWYHQKPGQSPK |
| | | LLISWASTRESGVPDRFSGSGSGTDFT |
| | | LTINSLQAEDVAVYYCQQYYSIPITFG |
| | | GGTKVEIKRTVAAPSVFIFPPSDEQLK |
| | | SGTASVVCLLNNFYPREAKVQWKVD |
| | | NALQSGNSQESVTEQDSKDSTYSLSS |
| | | TLTLSKADYEKHKVYACEVTHQGLS |
| | | SPVTKSFNRGEC |
| 1163 | MPK20298-A4_SCFV | CAGGTGCAGCTGGTGGAGTCTGGG |
| | | GGAGGCGTGGTCCAGCCTGGGAGG |
| | | TCCCTGAGACTCTCCTGTGTAGTCT |
| | | CTGGATTCAACTTCAGTAACAATGG |
| | | CATGCACTGGGTCCGCCAGGCTCCA |
| | | GGCAAGGGACTGGAGTGGGTGGCA |
| | | GTTATTTCAAATGATGGAAGTAATA |
| | | AATACTATGCAGACTCCGTGAAGG |
| | | GCCGATTCACCATCTCCAGAGACA |
| | | ATTCCAAGAACACGCTGTATCTACA |
| | | AATGAACAGCCTGAGAACTGAGGA |
| | | CACGGCTGTGTATTACTGTGCGAAA |
| | | GTTTACTATGGTTCGGGTATTTATT |
| | | ATAAAAACAGGAACTACTACGGTA |
| | | TGGACGTCTGGGGCCAAGGGACCA |
| | | CGGTCACCGTCTCCTCAGGTGGTGG |
| | | TGGTTCTGGCGGCGGCGGCTCCGGT |
| | | GGTGGTGGTTCTTCATATGAGCTGA |
| | | CTCAGCCACCCTCAGTGTCAGTGGC |
| | | CCTGGGACAGACGGCCAGGATTAC |
| | | CTGTGGGGGAAACAACATTGGAAG |
| | | TCAAAATGTGCACTGGTACCAGCA |
| | | GAAGCCAGGCCAGGCCCCTGTGCT |
| | | GGTCATCTATAGGGATAGCAACCG |
| | | GCCCTCTGGGATCCCTGACCGATTC |
| | | TCTGGCTCCAAGTCGGGGAACACG |
| | | GCCACCCTGACCATCAGCAGAGCC |
| | | CAAGCCGGGGATGAGGCTGACTAT |
| | | TACTGTCAGGTGTGGGACAGCAGC |
| | | ACTGTGGTTTTCGGCGGAGGGACC |
| | | AAGCTGACCGTCCTA |
| 1164 | MPK20299-D2_SCFV | CAGGTGCAGCTGGTGGAGTCTGGG |
| | | GGAGGCGTGGTCCAGCCTGGGAGG |
| | | TCCCTGAGACTCTCCTGTGCAGCCT |
| | | CTGGATTCAACTTCAGTAACTATGG |
| | | CATGCACTGGGTCCGCCAGGCTCCA |
| | | GGCAAGGGGCTGGAATGGGTGGCA |
| | | GTTATATCATATGATGGAAGTAATA |
| | | AATATTATGCAGACTCCGTGAAGG |
| | | GCCGATTCACCATCTCCAGAGACA |
| | | ATTCCAAGAACACGCTGTATCTACA |
| | | AATGAACAGCCTGAGAGCTGAGGA |
| | | CACGGCTGTGTATTTCTGTGCGAGA |
| | | GTTTACTATGGTTCGGGGATTTATT |
| | | ATAAAAAGAGATACTACTACGGTA |
| | | TGGACGTCTGGGGCCAAGGGACCA |
| | | CGGTCACCGTCTCCTCAGGTGGTGG |
| | | TGGTTCTGGCGGCGGCGGCTCCGGT |
| | | GGTGGTGGTTCTTCATATGAGCTGA |
| | | CTCAGCCACCCTCAGTGTCAGTGGC |
| | | CCTGGGACAGACGGCCAGGATTAC |
| | | CTGTGGGGGACACAACATTGGAAG |
| | | TAAAGGTGTGCACTGGTACCAGCA |
| | | GAAGCCAGGCCAGGCCCCTGTGCT |
| | | GGTCATCTATAGGAATAGCAACCG |
| | | GCCCTCTGGGATCCCTGAGCGATTC |
| | | TCTGGCTCCAACTCGGGGAACACG |
| | | GCCACCCTGACCATCACCAGAGCC |
| | | CAAGCCGGGGATGAGGCTGACTAT |
| | | TACTGTCAGGTGTGGGACAGCAGC |
| | | ACTGTGGTTTTCGGCGGAGGGACC |
| | | AAGCTGACCGTCCTA |
| 1165 | MPK20299-F11_SCFV | CAGGTGCAGCTGGTGGAGTCCGGG |
| | | GGAGGCGTGGTCCAGCCTGGGAGG |
| | | TCCCTGAGACTCTCCTGTGCACCCT |
| | | CTGGATTCAACTTCAGTAACTATGG |
| | | CATGCACTGGGTCCGCCAGGCTCCA |
| | | GGCAAGGGGCTGGAGTGGGTGGCA |
| | | GTTATATCATATGATGGAAGTAATA |
| | | AATATTATGCAGACTCCGTGAAGG |
| | | GCCGATTCACCATCTCCAGAGACA |
| | | ATTCCAAAAACACGCTGTTTCTGCA |
| | | AATGAACAGCCTGAGAGCTGAGGA |
| | | CACGGCTGTGTATTTCTGTGCGAGA |
| | | GTTTACTATGGTTCGGGGAGTTATT |
| | | ATAAAAAGAGATACTACTACGGTA |
| | | TGGACGTCTGGGGCCAAGGGACCA |
| | | CGGTCACCGTCTCCTCAGGTGGTGG |
| | | TGGTTCTGGCGGCGGCGGCTCCGGT |
| | | GGTGGTGGTTCTTCATATGAGCTGA |
| | | CTCAGCCACCCTCAGTGTCAGTGGC |
| | | CCTGGGACAGACGGCCAGGATTAC |
| | | CTGTGGGGGAAACAACATTGGAAG |
| | | TCAAAATGTGCACTGGTACCAGCA |
| | | GAAGCCAGGCCAGGCCCCTGTGCT |
| | | GGTCATCTATAGGGATAGCAACCG |
| | | GCCCTCTGGGATCCCTGAGCGATTC |
| | | TCTGGCTCCAAGTCGGGGAACACG |
| | | GCCACCCTGACCATCAGCAGAGCC |
| | | CAAGCCGGGGATGAGGCTGACTAT |
| | | TACTGTCAGGTGTGGGACAGCAGC |
| | | ACTGTGGTTTTCGGCGGAGGCACCC |
| | | AGCTGACCGTCCTA |
| 1166 | MPK20298-H6_SCFV | CAGGTGCAGCTGGTGGAGTCCGGG |
| | | GGAGGCGTGGTCCAGCCTGGGAGG |
| | | TCCCTGAGACTCTCCTGTGCAGCGT |
| | | CTGGATTCACCTTCAGTAGCTCTGG |
| | | CATGCACTGGGTCCGCCAGGCTCCA |
| | | GGCAAGGGGCTGGAGTGGGTGGCA |
| | | GTTATATCATATGATGGAACTAATA |
| | | AATACTATGCGGACTCCGTGAAGG |
| | | GCCGATTCACCATCTCCAGAGACA |
| | | ATTCCAAGAACACGCTGTATCTGCA |
| | | AATGAACAGCCTGAGAGCTGAGGA |
| | | CACGGCTGTGTATTACTGTGCGAAA |
| | | GTTTACTATGGTTCGGGTATTTATT |
| | | ATAAAAACAGGTACTACTACGGTA |
| | | TGGACGTCTGGGGCCAAGGGACCA |
| | | CGGTCACCGTCTCCTCAGGTGGTGG |
| | | TGGTTCTGGCGGCGGCGGCTCCGGT |
| | | GGTGGTGGTTCTTCATATGAGCTGA |
| | | CTCAGCCACCCTCAGTGTCAGTGGC |
| | | CCTGGGACAGACGGCCAGGATTAC |
| | | CTGTGGGGGACACAACATTGGAAG |
| | | TAAAGGTGTGCACTGGTACCAGCA |
| | | GAAGCCAGGCCAGGCCCCTGTGCT |
| | | GGTCATCTATAGAAATAGCAACCG |
| | | GCCCTCTGGGATCCCTGAGCGATTC |
| | | TCTGGCTCCAACTCGGGGAACACG |
| | | GCCACCCTGACCATCAGCAGAGCC |
| | | CAAGCCGGGGATGAGGCTGACTAT |
| | | TACTGTCAGGTGTGGGACAGCAGC |
| | | ACTGTGGTTTTCGGCGGAGGCACCC |
| | | AGCTGACCGTCCTA |
| 1167 | MPK20297-A4_SCFV | CAGGTGCAGCTGGTGGAGTCTGGG |
| | | GGAGGCGTGGTCCAGCCTGGGAGG |
| | | TCCCTGAGACTCTCCTGTGCAGTCT |
| | | CTGGATTCAACTTCAGTAACTATGG |
| | | CATGCACTGGGTCCGCCAGGTTCCA |
| | | GGCAGGGGGCTAGATTGGGTGGCA |
| | | GTTATATCAAATGATGGAAGTAAT |
| | | AAATACTATGCAGACTCCGTGAAG |
| | | GGCCGATTCACCATTTCCAGAGACA |
| | | ATTCCAAGAACACACTGTATCTGCA |
| | | AATGGACAGCCTGAGAACTGAGGA |
| | | CACGGCTGTGTATTACTGTGCGAAA |
| | | GTTTACTATGGTTCGGGTATTTATT |
| | | ATAAAAAGAGATACTACTACGGTA |
| | | TGGACGTCTGGGGCCAAGGGACCA |
| | | CGGTCACCGTCTCCTCAGGTGGTGG |
| | | TGGTTCTGGCGGCGGCGGCTCCGGT |
| | | GGTGGTGGTTCTTCATATGAGCTGA |
| | | CTCAGCCACCCTCAGTGTCAGTGGC |
| | | CCTGGGACAGACGGCCAGGATTAC |
| | | CTGTGGGGGACACAACATTGGAAG |
| | | TCAAAATGTGCACTGGTACCAGCA |
| | | GAAGCCAGGCCAGGCCCCTGTGCT |
| | | GGTCATCTATAGGGATAGCAACCG |
| | | GCCCTCTGGGATCCCTGAGCGATTC |
| | | TCTGGCTCCAAGTCGGGGAACACG |
| | | GCCACCCTGACCATCAGCAGAGCC |
| | | CAAGCCGGGGATGAGGCTGACTAT |
| | | TACTGTCAGGTGTGGGACAGCAGC |
| | | ACTGTGGTTTTCGGCGGAGGCACCC |
| | | AGCTGACCGTCCTA |
| 1168 | MPK20299-H8_SCFV | CAGGTGCAGCTGGTGGAGTCCGGG |
| | | GGAGGCGTGGTCCAGCCTGGGAGG |
| | | TCCCTGAGACTCTCCTGTGCAGCCT |
| | | CTGGATTCAACTTCAGTAACTATGG |
| | | CATGCACTGGGTCCGCCAGGCTCCA |
| | | GGCAAGGGGCTGGAATGGGTGGCA |
| | | GTTATATCATATGATGGAAGTAATA |
| | | AATATTATGCAGACTCCGTGAAGG |
| | | GCCGATTCACCATCTCCAGAGACA |
| | | ATTCCAAGAACACGCTGTATCTACA |
| | | AATGAACAGCCTGAGAGCTGAGGA |
| | | CACGGCTGTGTATTTCTGTGCGAGA |
| | | GTTTACTATGGTTCGGGGATTTATT |
| | | ATAAAAAGAGATACTACTACGGGA |
| | | TGGACGTCTGGGGCCAAGGGACCA |
| | | CGGTCACCGTCTCCTCAGGTGGTGG |
| | | TGGTTCTGGCGGCGGCGGCTCCGGT |
| | | GGTGGTGGTTCTTCATATGAGCTGA |
| | | CTCAGCCACCCTCGGTGTCAGTGGC |
| | | CCCAGGACAGACGGCCAGGATTAC |
| | | CTGTGGGGGAAACAACATTGGAAG |
| | | TAAAAATGTGCACTGGTACCAGCA |
| | | GAAGGCAGGCCAGGCCCCTGTGCA |
| | | GGTCATCTATAGAAATAGCAACCG |
| | | GCCCTCTGGGATCCCTGCGCGATTC |
| | | TCTGGCTCCAACTCGGGGAACACG |
| | | GCCACCCTGACCATCAGCAGAGCC |
| | | CAGGCCGGGGATGAGGCTGACTAT |
| | | TACTGTCAGGTGTGGGACAGCAGC |
| | | ACTGTGGTTTTCGGCGGTGGGACCA |
| | | AGCTGACCGTCCTA |
| 1169 | MPK20300-C11_SCFV | CAGGTGCAGCTGGTGGAGTCCGGG |
| | | GGAGGCGTGGTCCAGCCTGGGAGG |
| | | TCCCTGAGACTCTCCTGTGCAGCCT |
| | | CTGGATTCACCTTCAGTAGCTATGG |
| | | CATGCACTGGGTCCGCCAGGCTCCA |
| | | GGCAAGGGGCTGGAGTGGGTGGCA |
| | | GTTATATCATATGATGGAAGTAATA |
| | | AATACTATGCAGACTCCGTGAAGG |
| | | GCCGATTCACCATCTCCAGAGACA |
| | | ATTCCAAGAACACGCTGTATCTGCA |
| | | AATGAACAGCCTGAGAGGTGAGGA |
| | | CACGGCGGTGTATTACTGTGCGAG |
| | | AGTTTACTATGGTTCGGGGAGTTAT |
| | | TATAAAAACCGCTACTACTACGGTA |
| | | TGGACGTCTGGGGCCAAGGGACCA |
| | | CGGTCACCGTCTCCTCAGGTGGTGG |
| | | TGGTTCTGGCGGCGGCGGCTCCGGT |
| | | GGTGGTGGTTCTTCATATGAGCTGA |
| | | CTCAGCCACCCTCGGTGTCAGTGGC |
| | | CCCAGGACAGACGGCCAGGATTCC |
| | | CTGTGGGGGAAACAACATTGGAAG |
| | | TAAAAATGTGCACTGGTACCAGCA |
| | | GAAGCCAGGCCAGGCCCCTGTACT |
| | | GGTCATCTATAGGGATATCAACCG |
| | | GCCCTCTGGGATCCCTGAGCGATTC |
| | | TCTGGCTCCAACTCGGGGAACACG |
| | | GCCACCCTGACCATCAGCAGAGCC |
| | | CAAGCCGGGGATGAGGCTGACTAT |
| | | TACTGTCAGGTGTGGGACAGCAGC |
| | | GTGGTATTCGGCGGAGGGACCAAG |
| | | CTGACCGTCCTC |
| 1170 | MPK20298-B1_SCFV | CAGGTGCAGCTGGTGGAGTCCGGG |
| | | GGAGGCGTGGTCCAGCCTGGGAGG |
| | | TCCCTGAGACTCTCCTGTGCAGCCT |
| | | CTGGATTCAACTTCAGTAACTATGG |
| | | CATGCACTGGGTCCGCCAGGCTCCA |
| | | GGCAAGGGGCTGGAATGGGTGGCA |
| | | GTTATATCATATGATGGAAGTAATA |
| | | AATATTATGCAGACTCCGTGAAGG |
| | | GCCGATTCACCATCTCCAGAGACA |
| | | ATTCCAAGAACACGCTGTATCTACA |
| | | AATGAACAGCCTGAGAGGTGAGGA |
| | | CACGGCTGTGTATTTCTGTGCGAGA |
| | | GTTTACTATGGTTCGGGGATTTATT |
| | | ATAAAAAGAGATACTACTACGGTA |
| | | TGGACGTCTGGGGCCAAGGGACCA |
| | | CGGTCACCGTCTCCTCAGGTGGTGG |
| | | TGGTTCTGGCGGCGGCGGCTCCGGT |
| | | GGTGGTGGTTCTTCATATGAGCTGA |
| | | CTCAGCCACCCTCAGTGTCAGTGGC |
| | | CCTGGGACAGACGGCCAGGCTTAC |
| | | CTGTGAGGGAAACAACATTGGAAG |
| | | TAAAAATGTGCACTGGTACCAGCA |
| | | GAAGCCAGGCCAGGCCCCTGTGCT |
| | | GGTCATCTATAGGAATAGCAACCG |
| | | GCCCTCTGGGATCCCTGAGCGATTC |
| | | TCTGGCTCCAACTCGGGGAACACG |
| | | GCCACCCTGACTATTAGCAGAGTCC |
| | | AAGCCGGGGATGAGGCTGACTATT |
| | | ACTGTCAGGCGTGGGACAGCAGCA |
| | | CTGTGGTATTCGGCGGAGGCACCC |
| | | AGCTGACCGTCCTA |
| 1171 | MPK20297-E5_SCFV | CAGGTGCAGCTGGTGGAGTCCGGG |
| | | GGAGGCCTGGTCAAGCCTGGGGGG |
| | | TCCCTGAGACTCTCCTGTGCAGTCT |
| | | CTGGATTCAACTTCAGTAACAATGG |
| | | CATGCACTGGGTCCGCCAGGCTCCA |
| | | GGCAAGGGGCTGGAGTGGGTGGCA |
| | | GTCATATCGTATGATGGAAGTAATA |
| | | AATACTATACAGACTCCGTGAAGG |
| | | GCCGATTCACCATCTCCAGAGACA |
| | | ATTCCAAGAACACGCTGTATCTGCA |
| | | AATGAACAGCCTGAGAACTGAGGA |
| | | CACGGCTGTGTATTACTGTGCGAAA |
| | | GTTTACTATGGTTCGGGTATTTATT |
| | | ATAAAAAGAGATACTACTACGGTA |
| | | TGGACGTCTGGGGCCAAGGGACCA |
| | | CGGTCACCGTCTCCTCAGGTGGTGG |
| | | TGGTTCTGGCGGCGGCGGCTCCGGT |
| | | GGTGGTGGTTCTTCATATGAGCTGA |
| | | CTCAGCCACTCTCAGTGTCAGAGGC |
| | | CCTGGGACAGACGGCCAGGATTAC |
| | | CTGTGGGGGAAACAACATTGGAAG |
| | | TAAAAATGTGCACTGGTACCAGCA |
| | | GAAGCCAGGCCAGGCCCCTGTACT |
| | | GGTCATCTATAGGGATAGCAACCG |
| | | GCCCTCAGGGATCCCTGAGCGATTC |
| | | TCTGGCTCCAACTCTGGGAACGCGG |
| | | CCACCCTGACCATCAGTAGGGTCG |
| | | AAGCCGGGGATGAGGCCGACTATT |
| | | ACTGTCAGGTGTGGGATAGTAGCA |
| | | GTGATCATGTGGTATTCGGCGGAG |
| | | GCACCCAGCTGACCGTCCTA |
| 1172 | MPK20299-A3_SCFV | CAGGTGCAGCTGGTGGAGTCTGGG |
| | | GGAGGCGTGGTCCAGCCTGGGAGG |
| | | TCCCTGAGACTCTCCTGTGCAGCCT |
| | | CTGGATTCAACTTCAGTAACTATGG |
| | | CATGCACTGGGTCCGCCAGGCTCCA |
| | | GGCAAGGGGCTGGAATGGGTGGCA |
| | | GTTATATCATATGATGGAAGTAATA |
| | | AATATTATGCAGACTCCGTGAAGG |
| | | GCCGATTCACCATCTCCAGAGACA |
| | | ATTCCAAGAACACGCTGTATCTACA |
| | | AATGAACAGCCTGAGAGCTGAGGA |
| | | CACGGCTGTGTATTTCTGTGCGAGA |
| | | GTTTACTATGGTTCGGGGATTTATT |
| | | ATAAAAAGAGATACTACTACGGTA |
| | | TGGACGTCTGGGGCCAAGGGACCA |
| | | CGGTCACCGTCTCCTCAGGTGGTGG |
| | | TGGTTCTGGCGGCGGCGGCTCCGGT |
| | | GGTGGTGGTTCTTCATATGAGCTGA |
| | | CTCAGCCACCCTCGGTGTCAGTGGC |
| | | CCCAGGACAGACGGCCAGGATTAC |
| | | CTGTGGGGGAAACAACATTGGAAG |
| | | TAAAAATGTGCACTGGTACCAGCA |
| | | GAAGCCAGGCCAGGCCCCTGTACT |
| | | GGTCATCTATAGAAATAGCAACCG |
| | | GCCCTCTGGGATCCCTGAGCGATTC |
| | | TCTGGCTCCAACTCTGGGAACACAG |
| | | CCACTCTGACCATCAGCGGGACCC |
| | | AGGCTATGGATGAGGCTGACTATT |
| | | ACTGTCAGGCGTGGGACAGCAGCA |
| | | ATGTGGTATTCGGCGGAGGCACCC |
| | | AGCTGACCGTCCTA |
| 1173 | MPK20297-B4_SCFV | CAGGTGCAGCTGGTGGAGTCCGGG |
| | | GGAGGCGTGGTCCAGCCTGGGAGG |
| | | TCCCTGAGACTCTCCTGTGTAGTCT |
| | | CTGGATTCAACTTCAGTAGGAATGG |
| | | CATGCACTGGGTCCGCCAGGTTCCA |
| | | GGCAGGGGGCTAGATTGGGTGGCA |
| | | GTTATATCAAATGATGGAAGTAAT |
| | | AAATACTATGCAGACTCCGTGAAG |
| | | GGCCGATTCACCATCTCCAGAGAC |
| | | AATTCCAAGAACACGCTGTATCTGC |
| | | AAATGAACAGCCTGAGAGCTGAGG |
| | | ACACGGCTGTGTATTACTGTGCGAA |
| | | AGTTTACTATGGTTCGGGGATTTAT |
| | | TATAAAAATAACTACTATTACGGTA |
| | | TGGACGTCTGGGGCCAAGGGACCA |
| | | CGGTCACCGTCTCCTCAGGTGGTGG |
| | | TGGTTCTGGCGGCGGCGGCTCCGGT |
| | | GGTGGTGGTTCTTCATATGAGCTGA |
| | | CTCAGCCACTCTCAGTGTCAGTGGC |
| | | CCTGGGACAGACGGCCAGGATTAC |
| | | CTGTGGGGGAAACAACATTGGAAG |
| | | TCAAAATGTGCACTGGTACCAGCA |
| | | GAAGCCAGGCCAGGCCCCTGTGCT |
| | | GGTCATCTATAGGGATAGCAACCG |
| | | GCCCTCTGGGATCCCTGACCGATTC |
| | | TCTGGCTCCAAGTCGGGGAACACG |
| | | GCCACCCTGACCATCAGCAGAGCC |
| | | CAAGCCGGGGATGAGGCTGACTAT |
| | | TACTGTCAGGTGTGGGACAGCAGC |
| | | ACTGTGGTTTTCGGCGGAGGCACCC |
| | | AGCTGACCGTCCTA |
| 1174 | MPK20298-F6_SCFV | CAGGTGCAGCTGGTGGAGTCTGGG |
| | | GGAGGCGTGGTCCAGCCTGGGAGG |
| | | TCCCTGAGACTCTCCTGTGTAGTCT |
| | | CTGGATTCAACTTCAGTAGGAATGG |
| | | CATGCACTGGGTCCGCCAGGTTCCA |
| | | GGCAGGGGGCTAGATTGGGTGGCA |
| | | GTTATATCAAATGATGGAAGTAAT |
| | | AAATACTATGCAGACTCCGTGAAG |
| | | GGCCGATTCACCATCTCCAGAGAC |
| | | AATTCCAAGAACACGCTGTATCTGC |
| | | AAATGAACAGCCTGAGAGCTGAGG |
| | | ACACGGCTGTGTATTACTGTGCGAA |
| | | AGTTTACTATGGTTCGGGGATTTAT |
| | | TATAAAAACCGCTATTACTACGGTA |
| | | TGGACGTCTGGGGCCAAGGGACCA |
| | | CGGTCACCGTCTCCTCAGGTGGTGG |
| | | TGGTTCTGGCGGCGGCGGCTCCGGT |
| | | GGTGGTGGTTCTTCATATGAGCTGA |
| | | CTCAGCCACCCTCGGTGTCAGTGGC |
| | | CCCAGGACAGACGGCCAGGATTAC |
| | | CTGTGGGGGAAACAACATTGGAAG |
| | | TAAAAATGTGCACTGGTACCAGCA |
| | | GAAGCCAGGCCAGGCCCCTGTGCT |
| | | GGTCATCTATAGGGATAGCAACCG |
| | | GCCCTCTGGGATCCCTGAGCGATTC |
| | | TCTGGCTCCAAGTCGGGGACCACG |
| | | GCCACCCTGACCATCAGCAGAGCC |
| | | CAAGCCGGGGATGAGGCTGAGTAT |
| | | TACTGTCAGGTGTGGGACAGCAGC |
| | | ACTGTGGTTTTCGGCGGAGGGACC |
| | | GAGCTGACCGTCCTA |
| 1175 | MPK20299-H3_SCFV | CAGGTGCAGCTGGTGGAGTCCGGG |
| | | GGAGGCGTGGTCCAGCCTGGGAGG |
| | | TCCCTGAGACTCTCCTGTGCAGCCT |
| | | CTGGATTCAACTTCAGTAACTATGG |
| | | CATGCACTGGGTCCGCCAGGCTCCA |
| | | GGCAAGGGGCTGGAATGGGTGGCA |
| | | GTTATATCATATGATGGAAGTAATA |
| | | AATATTATGCAGACTCCGTGAAGG |
| | | GCCGATTCACCATCTCCAGAGACA |
| | | ATTCCAAGAACACGCTGTATCTACA |
| | | AATGAACAGCCTGAGAGCTGAGGA |
| | | CACGGCTGTGTATTTCTGTGCGAGA |
| | | GTTTACTATGGTTCGGGGATTTATT |
| | | ATAAAAAGAGATACTACTACGGTA |
| | | TGGACGTCTGGGGCCAAGGGACCA |
| | | CGGTCACCGTCTCCTCAGGTGGTGG |
| | | TGGTTCTGGCGGCGGCGGCTCCGGT |
| | | GGTGGTGGTTCTTCATATGAGCTGA |
| | | CACAGCCACTCTCAGTGTCAGTGGC |
| | | CCTGGGACAGACGGCCAGGATTAC |
| | | CTGTGGGGGAAACAACATTGGAAG |
| | | TAAAAATGTGCACTGGTACCAGCA |
| | | GAAGCCAGGCCAGGCCCCTGTGCT |
| | | GGCCATCTATAGGAATAGCAACCG |
| | | GCCCTCTGGGATCCCTGAGCGATTC |
| | | ACTGGCTCCAACTCGGGGAACACG |
| | | GCCACCCTGACCATCAGCAGAGCC |
| | | CAAGCCGGGGATGAGTCTGACTAT |
| | | TACTGTCAAATATGGGACAGCAGC |
| | | ACTGTGGTATTCGGCGGAGGCACC |
| | | AAGCTGACCGTCCTA |
| 1176 | MPK20298-B9_SCFV | CAGGTGCAGCTGGTGGAGTCCGGG |
| | | GGAGGCGTGGTCCAGCCTGGGAGG |
| | | TCCCTGAGACTCTCCTGTGCAGCCT |
| | | CTGGATTCAACTTCAGTAGGAATGG |
| | | CATGCACTGGGTCCGCCAGGTTCCA |
| | | GGCAGGGGGCTAGATTGGGTGGCA |
| | | GTTATATCAAATGATGGAAGTAAT |
| | | AAATACTATGCGGACTCCGTGAAG |
| | | GGCCGATTCACCATCTCCAGAGAC |
| | | AATTCCAAGAACACGCTGTATCTGC |
| | | AAATGAACAGCCTGAGAGCTGAGG |
| | | ACACGGCTGTGTATTACTGTGCGAA |
| | | AGTTTACTATGGTTCGGGTATTTAT |
| | | TATAAAAAGAACTACTACTACGGT |
| | | ATGGACGTCTGGGGCCAAGGGACC |
| | | ACGGTCACCGTCTCCTCAGGTGGTG |
| | | GTGGTTCTGGCGGCGGCGGCTCCG |
| | | GTGGTGGTGGTTCTTCATATGAGCT |
| | | GACTCAGCCACCCTCGGTGTCAGTG |
| | | GCCCTGGGACAGACGGCCAGGATT |
| | | TCCTGTGGGGGAAACAACATTGGA |
| | | AGTAAAAATGTGCACTGGTACCAG |
| | | CAGAAGCCAGGCCAGGCCCCTGTG |
| | | CTGGTCATCTATAGGGATAGCAACC |
| | | GGCCCTCTGGGATCCCTGAGCGATT |
| | | CTCTGGCTCCAAGTCGGGGACCAC |
| | | GGCCACCCTGACCATCAGCAGAGC |
| | | CCAAGCCGGGGATGAGGCTGAGTA |
| | | TTACTGTCAGGTGTGGGACAGCAG |
| | | CACTGTGGTTTTCGGCGGAGGCACC |
| | | CAGCTGACCGTCCTA |
| 1177 | MPK20299-E2_SCFV | CAGGTGCAGCTGGTGGAGTCCGGG |
| | | GGAGGCGTGGTCCAGCCTGGGAGG |
| | | TCCCTGAGACTCTCCTGTGCAGTCT |
| | | CTGGATTCAACTTCAGTAACAATGG |
| | | CATGCACTGGGTCCGCCAGGCTCCA |
| | | GGCAAGGGGCTGGAGTGGGTGGCA |
| | | GTCATATCGTATGATGGAAGTAATA |
| | | AATACTATACAGACTCCGTGAAGG |
| | | GCCGATTCACCATCTCCAGAGACA |
| | | ATTCCAAGAACACGCTGTATCTGCA |
| | | AATGAACAGCCTGAGAACTGAGGA |
| | | CACGGCTGTGTATTACTGTGCGAAA |
| | | GTTTACTATGGTTCGGGTATTTATT |
| | | ATAAAAAGAGATACTACTACGGTA |
| | | TGGACGTCTGGGGCCAAGGGACCA |
| | | CGGTCACCGTCTCCTCAGGTGGTGG |
| | | TGGTTCTGGCGGCGGCGGCTCCGGT |
| | | GGTGGTGGTTCTTCATATGAGCTGA |
| | | CTCAGCCACCCTCAGTGTCAGTGGC |
| | | CCTGGGACAGACGGCCAGGATTAC |
| | | CTGTGAGGGAAACAACATTGGAAG |
| | | TCAAAATGTGCACTGGTACCAGCA |
| | | GAAGCCAGGCCAGGCCCCTGTGCT |
| | | GGTCATGTATAGGGATAGCAACCG |
| | | GCCCTCTGGGATCCCTGAACGATTC |
| | | TCTGGCTCCAAGTCGGGGAACACG |
| | | GCCACCCTGGCCATCAGCAGAGCC |
| | | CAAGCCGGGGATGAGTCTGACTAT |
| | | TACTGTCAGGTGTGGGACGGCAGT |
| | | GCCGTGGTATTCGGCGGAGGGACC |
| | | AAGCTGACCGTCCTA |
| 1178 | MPK20299-D6_SCFV | CAGGTGCAGCTGGTGGAGTCTGGG |
| | | GGAGGCGTGGTCCAGCCTGGGAGG |
| | | TCCCTGAGACTCTCCTGTGCAGCGT |
| | | CTGGATTCACCTTCAGTAGCTATGG |
| | | CATGCACTGGGTCCGCCAGGCTCCA |
| | | GGCAAGGGGCTGGAGTGGGTGGCA |
| | | GTTATATCATATGATGGAAGTAATA |
| | | AATATTATGCAGACTCCGTGAAGG |
| | | GCCGATTCACCATCTCCAGAGACA |
| | | ATTCCAAGAACACGCTGTATCTACA |
| | | AATGAACAGCCTGAGAGCTGAGGA |
| | | CACGGCTGTGTATTTCTGTGCGAGA |
| | | GTTTACTATGGTTCGGGGATTTATT |
| | | ATAAAAAGAGATACTACTACGGTA |
| | | TGGACGTCTGGGGCCAAGGGACCA |
| | | CGGTCACCGTCTCCTCAGGTGGTGG |
| | | TGGTTCTGGCGGCGGCGGCTCCGGT |
| | | GGTGGTGGTTCTTCATATGAGCTGA |
| | | CTCAGCCACTCTCAGTGTCAGTGGC |
| | | CCTGGGACAGACGGCCAGGATTAC |
| | | CTGTGAGGGAAACAACATTGGAAG |
| | | TCAAAATGTGCACTGGTACCAGCA |
| | | GAAGCCAGGCCAGGCCCCTGTGCT |
| | | GGTCATGTATAGGGATAGCAACCG |
| | | GCCCTCTGGGATCCCTGAACGATTC |
| | | TCTGGCTCCAAGTCGGGGAACACG |
| | | GCCACCCTGGCCATCAGCAGAGCC |
| | | CAAGCCGGGGATGAGTCTGACTAT |
| | | TACTGTCAGGTGTGGGACGGCAGT |
| | | GCCGTGGTATTCGGCGGAGGCACC |
| | | CAGCTGACCGTCCTA |
| 1179 | MPK20299-A4_SCFV | CAGGTGCAGCTGGTGGAGTCCGGG |
| | | GGAGGCGTGGTCCAGCCTGGGAGG |
| | | TCCCTGAGACTCTCCTGTGCAGCGT |
| | | CTGGATTCACCTTCAGTAACTATGG |
| | | CTTTCACTGGGTCCGCCAGACTCCA |
| | | GGCAAGGGGCTGGAGTGGGTGGCA |
| | | GTTATATCATATGATGGAAGTAATA |
| | | GATACTATGCAGACTCCGTGAAGG |
| | | GCCGATTCACCATCTCCAGAGACA |
| | | ATTCCAAGAACACGCTGTATCTCCA |
| | | AATGAACAGCCTGAGAGGTGAGGA |
| | | CACGGCGCTATATTACTGTGCGAGA |
| | | GTTTACTATGGTTCGGGGACTTATT |
| | | ATAAAAACCGCTACTACTACGGTAT |
| | | GGACGTCTGGGGCCAAGGGACCAC |
| | | GGTCACCGTCTCCTCAGGTGGTGGT |
| | | GGTTCTGGCGGCGGCGGCTCCGGT |
| | | GGTGGTGGTTCTTCATATGAGCTGA |
| | | CTCAGCCACCCTCAGTGTCAGTGGC |
| | | CCTGGGACAGACGGCCAGGATTAC |
| | | CTGTGGGGGACACAACATTGGAAG |
| | | TAAAGGTGTGCACTGGTACCAGCA |
| | | GAAGCCAGGCCAGGCCCCTGTACT |
| | | GGTCATCTATAGAAATAGCAACCG |
| | | GCCCTCTGGGATCCCTGAGCGATTC |
| | | TCTGGCTCCAACTCTGGGAACACAG |
| | | CCACTCTGACCATCAGCGGGACCC |
| | | AGGCTATGGATGAGGCTGACTATT |
| | | ACTGTCAGGCGTGGGACAGCGGCA |
| | | CTGTGGTATTCGGCGGAGGCACCC |
| | | AGCTGACCGTCCTA |
| 1180 | MPK20300-G5_SCFV | CAGGTGCAGCTGGTGGAGTCCGGG |
| | | GGAGGCGTGGTCCAGCCTGGGAGG |
| | | TCCCTGAGACTCTCCTGTGCAGCCT |
| | | CTGGATTCACCTTCAGTAACTATGG |
| | | CTTTCACTGGGTCCGCCAGACTCCA |
| | | GGCAAGGGGCTGGAGTGGGTGGCA |
| | | GTTATATCATATGATGGAAGTAATA |
| | | GATACTATGCAGACTCCGTGAAGG |
| | | GCCGATTCACCATCTCCAGAGACA |
| | | ATTCCAAGAACACGCTGTATCTCCA |
| | | AATGAACAGCCTGAGAGGTGAGGA |
| | | CACGGCGCTATATTACTGTGCGAGA |
| | | GTTTACTATGGTTCGGGGACTTATT |
| | | ATAAAAACCGCTACTACTACGGTAT |
| | | GGACGTCTGGGGCCAAGGGACCAC |
| | | GGTCACCGTCTCCTCAGGTGGTGGT |
| | | GGTTCTGGCGGCGGCGGCTCCGGT |
| | | GGTGGTGGTTCTTCATATGAGCTGA |
| | | CTCAGCCACCCTCAGTGTCAGTGGC |
| | | CCTGGGACAGACGGCCAGGATTAC |
| | | CTGTGGGGCAAACAACATTGGAAG |
| | | TAAAAATGTTCACTGGTACCAGCA |
| | | GAAGCCAGGCCAGCCCCCTGTGCT |
| | | GGTCATCTATAGAGATTTCAACCGG |
| | | CCCTCTGGGATCCCTGAGCGATTCT |
| | | CTGCCTCCAACTCGGGGAACACGG |
| | | CCACCCTGACCATCAGCAGAGGCC |
| | | AAGCCGGGGATGAGGCTGACTATT |
| | | ACTGTCAGGTGTGGGACAGCAGCA |
| | | CTGGGAATGTGGTATTCGGCGGAG |
| | | GGACCAAGCTGACCGTCCTA |
| 1181 | MPK20299-C3_SCFV | CAGGTGCAGCTGGTGGAGTCTGGG |
| | | GGAGGCGTGGTCCAGCCTGGGAGG |
| | | TCCCTGAGACTCTCCTGTGCAGCCT |
| | | CTGGATTCATCTTCAGTAACTATGG |
| | | CTTTCACTGGGTCCGCCAGACTCCA |
| | | GGCAAGGGGCTGGAGTGGGTGGCA |
| | | GTTATATCATATGATGGAAGTAATA |
| | | AATACTATGCAGACTCCGTGAAGG |
| | | GCCGATTCACCATCTCCAGAGACA |
| | | ATTCCAAGAACACGCTGTATCTGCA |
| | | AATGAACAGCCTGAGAGGTGAGGA |
| | | CACGGCGGTGTATTACTGTGCGAG |
| | | AGTTTACTATGGTTCGGGGAGTTAT |
| | | TATAAAAACCGCTACTACTACGGTA |
| | | TGGACGTCTGGGGCCAAGGGACCA |
| | | CGGTCACCGTCTCCTCAGGTGGTGG |
| | | TGGTTCTGGCGGCGGCGGCTCCGGT |
| | | GGTGGTGGTTCTTCATATGAGCTGA |
| | | CTCAGCCACCCTCGGTGTCAGTGGC |
| | | CCCAGGACAGACGGCCAGGATTAC |
| | | CTGTGGGGGAAACAACATTGGAAG |
| | | TAAAAATGTGCACTGGTACCAGCA |
| | | GAAGCCAGGCCAGGCCCCTGTGCT |
| | | GGTCATCTATAGGGATAGCAACCG |
| | | GCCCTCTGGGATCCCTGAGCGATTC |
| | | TCTGGCTCCAAGTCGGGGACCACG |
| | | GCCACCCTGACCATCAGCAGAGCC |
| | | CAAGCCGGGGATGAGGCTGACTAT |
| | | TACTGTCAGGTGTGGGACAGCAGC |
| | | ACTGTGGTTTTCGGCGGAGGGACC |
| | | GAGCTGACCGTCCTA |
| 1182 | MPK20299-B7_SCFV | CAGGTGCAGCTGGTGGAGTCTGGG |
| | | GGAGGCGTGGTCCAGCCTGGGAGG |
| | | TCCCTGAGACTCTCCTGTGCAGCCT |
| | | CTGGATTCAACTTCAGTAACTATGG |
| | | CATGCACTGGGTCCGCCAGGCTCCA |
| | | GGCAAGGGGCTGGAATGGGTGGCA |
| | | GTTATATCATATGATGGAAGTAATA |
| | | AATATTATGCAGACTCCGTGAAGG |
| | | GCCGATTCACCATCTCCAGAGACA |
| | | ATTCCAAGAACACGCTGTATCTACA |
| | | AATGAACAGCCTGAGAGGTGAGGA |
| | | CACGGCTGTGTATTTCTGTGCGAGA |
| | | GTTTACTATGGTTCGGGGATTTATT |
| | | ATAAAAAGAGATACTACTACGGTA |
| | | TGGACGTCTGGGGCCAAGGGACCA |
| | | CGGTCACCGTCTCCTCAGGTGGTGG |
| | | TGGTTCTGGCGGCGGCGGCTCCGGT |
| | | GGTGGTGGTTCTTCATATGAGCTGA |
| | | CTCAGTCATCCTCGGTGTCAGTGGC |
| | | CCCAGGACAGACGGCCAGGATTAC |
| | | CTGTGGGGGAAACAACATTGGAAG |
| | | TAAAAATGTGCACTGGTACCAGCA |
| | | GAAGCCAGGCCAGGCCCCTGTGTT |
| | | GGTCATCTATAGGGATAGCAACCG |
| | | GCCCTCTGGGATCCCTGAGCGATTC |
| | | TCTGGCTCCAAGTCGGGGACCACG |
| | | GCCACCCTGACCATCAGCAGGGTC |
| | | GAAGCCGGGGATGAGGCCGACTAT |
| | | TACTGTCAGGTGTGGGATAGTAGTA |
| | | GTGCTCATGTGATATTCGGCGGAGG |
| | | GACCAAGCTGACCGTCCTA |
| 1183 | MPK20299-A5_SCFV | CAGGTGCAGCTGGTGGAGTCCGGG |
| | | GGAGGCGTGGTCCAGCCTGGGAGG |
| | | TCCCTGAGACTCTCCTGTGGAGCCT |
| | | CTGGATTCACCTTCAGTGGCTATGG |
| | | CATGCACTGGGTCCGCCAGGCTCCA |
| | | GGCAAGGGGCTGGAGTGGGTGGCA |
| | | GTTATATCATATGATGGAAGTAATA |
| | | AATACTATGCAGACTCCGTGAAGG |
| | | GCCGATTCACCATCTCAAGAGACA |
| | | ATTCCAAGAACACGCTGTATCTGCA |
| | | AATGAACAGCCTGAGAGGTGAGGA |
| | | CACGGCGGTGTATTACTGTGCGAG |
| | | AGTTTATTATGGTTCGGGGATTTAT |
| | | TATAAAAACCGCTACTACTACGGTA |
| | | TGGACGTCTGGGGCCAAGGGACCA |
| | | CGGTCACCGTCTCCTCAGGTGGTGG |
| | | TGGTTCTGGCGGCGGCGGCTCCGGT |
| | | GGTGGTGGTTCTTCATATGAGCTGA |
| | | CTCAGCCACCCTCAGGGTCAGTGGC |
| | | CCTGGGACAGACGGCCAGGATCAC |
| | | CTGTGGGGGAAACAACCTTGGAAG |
| | | TAAAAATGTGCACTGGTACCAACA |
| | | GAAGCCAGGCCAGGCCCCTGTGCT |
| | | GGTCATCTATAGAAATAGCAACCG |
| | | GCCCTCTGGGATCCCTGAGCGATTC |
| | | TCTGGCTCCAACTCGGGGAACACG |
| | | GCCACCCTGACCATCAGCAGAGCC |
| | | CAGGCCGGGGATGAGGCTGACTAT |
| | | TACTGTCAGGTGTGGGACAGCAGC |
| | | ACTGTGGTATTCGGCGGTGGGACC |
| | | AAGCTGACCGTCCTA |
| 1184 | MPK20299-D1_SCFV | CAGGTGCAGCTGGTGGAGTCTGGG |
| | | GGAGGCCTGGTCAAGCCTGGGGGG |
| | | TCCCTGAGACTCTCCTGTGCAGCCT |
| | | CTGGATTCACCTTCAGTAACAATGG |
| | | CATGCACTGGGTCCGCCAGGCTCCA |
| | | GGCAAGGGGCTGGAGTGGGTGGCA |
| | | GTCATATCGTATGATGGAAGTAATA |
| | | AATACTATGCGGACTCCGTGAAGG |
| | | GCCGATTCACCATCTCCAGAGACA |
| | | ATTCCAAGAACACGCTGTATCTGCA |
| | | AATGAACAGCCTGAGAGCTGAGGA |
| | | CACGGCTGTGTATTACTGTGCGAAA |
| | | GTTTATTATGGTTCGGGGATTTATT |
| | | ATAAAAACAGGTATTACTACGGGA |
| | | TGGACGTCTGGGGCCAAGGGACCA |
| | | CGGTCACCGTCTCCTCAGGTGGTGG |
| | | TGGTTCTGGCGGCGGCGGCTCCGGT |
| | | GGTGGTGGTTCTTCATATGAGCTGA |
| | | CTCAGCCACCCTCAGTGTCAGTGGC |
| | | CCTGGGACAGACGGCCAGGATTAC |
| | | CTGTGGGGGAAACAGAATTGGAAG |
| | | TAAAAATGTGCACTGGTACCAGCA |
| | | GAAGCCAGGCCAGGCCCCTGTGTT |
| | | GGTCATCTATAGGGATAGCAACCG |
| | | GCCCTCTGGGATCCCTGAGCGATTC |
| | | TCTGGCTCCAAGTCGGGGACCACG |
| | | GCCACCCTGACCATCAGCAGAGCC |
| | | CAAGCCGGGGATGAGGCTGAGTAT |
| | | TACTGTCAGGTGTGGGACAGCAGC |
| | | ACTGTGGTTTTCGGCGGAGGGACC |
| | | AAGCTGACCGTCCTA |
| 1185 | MPK20299-C5_SCFV | CAGGTGCAGCTGGTGGAGTCTGGG |
| | | GGAGGCGTGGTCCAGCCTGGGAGG |
| | | TCCCTGAGACTCTCCTGTGCAGCCT |
| | | CTGGATTCACCTTCAGTAACTATGG |
| | | CTTTCACTGGGTCCGCCAGACTCCA |
| | | GGCAAGGGGCTGGAGTGGGTGGCA |
| | | GTTATATCATATGATGGAAGTAATA |
| | | GATACTATGCAGACTCCGTGAAGG |
| | | GCCGATTCACCATCTCCAGAGACA |
| | | ATTCCAAGAACACGCTGTATCTGCA |
| | | AATGAACAGCCTGAGAGGTGAGGA |
| | | CACGGCGCTATATTACTGTGCGAGA |
| | | GTTTACTATGGTTCGGGGACTTATT |
| | | ATAAAAACCGCTACTACTACGGTAT |
| | | GGACGTCTGGGGCCAAGGGACCAC |
| | | GGTCACCGTCTCCTCAGGTGGTGGT |
| | | GGTTCTGGCGGCGGCGGCTCCGGT |
| | | GGTGGTGGTTCTTCATATGAGCTGA |
| | | CACAGCTACCTTCAGTGTCAGTGGC |
| | | CCTGGGACAGACGGCCAGGATTAC |
| | | CTGTGGGGGACACAACATTGGAAG |
| | | TAAAGGTGTGCACTGGTACCAGCA |
| | | GAAGCCAGGCCAGGCCCCTGTGCT |
| | | GGTCATCTATAGAAATAGCAACCG |
| | | GCCCTCTGGGATCCCTGAGCGATTC |
| | | TCTGGCTCCAACTCGGGGAACACG |
| | | GCCACCCTGACCATCAGCAGAGCC |
| | | CAAGCCGGGGATGAGGCTGACTAT |
| | | TACTGTCAGGTGTGGGACAGCAGC |
| | | ACTGTGGTTTTCGGCGGAGGGACC |
| | | GAGCTGACCGTCCTA |
| 1186 | MPK20299-B5_SCFV | CAGGTGCAGCTGGTGGAGTCTGGG |
| | | GGAGGCGTGGTCCAGCCTGGGAGG |
| | | TCCCTGAGACTCTCCTGTGCAGCCT |
| | | CTGGATTCAACTTCAGTAACTATGG |
| | | CATGCACTGGGTCCGCCAGGCTCCA |
| | | GGCAAGGGGCTGGAATGGGTGGCA |
| | | GTTATATCATATGATGGAAGTAATA |
| | | AATATTATGCAGACTCCGTGAAGG |
| | | GCCGATTCACCATCTCCAGAGACA |
| | | ATTCCAAGAACACGCTGTATCTACA |
| | | AATGAACAGCCTGAGAGCTGAGGA |
| | | CACGGCTGTGTATTTCTGTGCGAGA |
| | | GTTTACTATGGTTCGGGGATTTATT |
| | | ATAAAAACCGCTATTACTACGGTAT |
| | | GGACGTCTGGGGCCAAGGGACCAC |
| | | GGTCACCGTCTCCTCAGGTGGTGGT |
| | | GGTTCTGGCGGCGGCGGCTCCGGT |
| | | GGTGGTGGTTCTTCATATGAGCTGA |
| | | CTCAGCCACCCTCAGTGTCAGTGGC |
| | | CCTGGGACAGACGGCCAGGATTAC |
| | | CTGTGGGGGACACAACATTGGAAG |
| | | TAAAGGTGTGCACTGGTACCAGCA |
| | | GAAGCCAGGCCAGGCCCCTGTGCT |
| | | GGTCATCTATAGAAATAGCAACCG |
| | | GCCCTCTGGGATCCCTGAGCGATTC |
| | | TCTGGCTCCAACTCGGGGAACACG |
| | | GCCACCCTGACCATCAGCAGAGCC |
| | | CAAGCCGGGGATGAGGCTGACTAT |
| | | TACTGTCAGGTGTGGGACAGTAGT |
| | | ACTGTGGTTTTCGGCGGAGGCACCC |
| | | AGCTGACCGTCCTA |
| 1187 | MPK20299-G9_SCFV | CAGGTGCAGCTGGTGGAGTCTGGG |
| | | GGAGACTTGGTACAGCCTGGGAGG |
| | | TCCCTGAGACTCTCCTGTGCAGCGT |
| | | CTGGATTCACCTTCAGTAACAATGG |
| | | CATGCACTGGGTCCGCCAGGCTCCA |
| | | GGCAAGGGACTGGAGTGGGTGGCA |
| | | GTTATTTCAAATGATGGCAGTAATA |
| | | AATATTATGCAGATTCCGTGAGGG |
| | | GCCGATTCACCATCTCCAGAGACA |
| | | ATTCCAAGAACACGCTGTATCTGCA |
| | | AATGAACAGCCTGAGAGCTGAGGA |
| | | CACGGCTGTGTATTATTGTGCGAAA |
| | | GTTTACTATGGTTCGGGTATTTATT |
| | | ATAAAAACAGGTACTACTACGGGA |
| | | TGGACGTCTGGGGCCAAGGGACCA |
| | | CGGTCACCGTCTCCTCAGGTGGTGG |
| | | TGGTTCTGGCGGCGGCGGCTCCGGT |
| | | GGTGGTGGTTCTTCATATGAGCTGA |
| | | CTCAGCCACTCTCAGTGTCAGTGGC |
| | | CCTGGGACAGACGGCCAGGATTAC |
| | | CTGTGGGGGAAACAACATTGGAAG |
| | | TAAAAATGTGCACTGGTACCAGCA |
| | | GAAGCCAGGCCAGGCCCCTGTGCT |
| | | GGTCATCTATAGGAATAGCAACCG |
| | | GCCCTCTGGGATCCCTGAGCGATTC |
| | | TCTGGCTCCAACTCGGGGAACACG |
| | | GCCACCCTGACTCTTAGCAGAGTCC |
| | | AAGCCGGGGATGAGGCTGACTATT |
| | | ACTGTCAGGTGTGGGACAGCAGCA |
| | | CTGTGGTTTTCGGCGGAGGGACCA |
| | | AGCTGACCGTCCTA |
| 1188 | MPK20299-G5_SCFV | CAGGTGCAGCTGGTGGAGTCCGGG |
| | | GGAGGCGTGGTCCAGCCTGGGAGG |
| | | TCCCTGAGACTCTCCTGTGCAGTCT |
| | | CTGGATTCAACTTCAGTAACAATGG |
| | | CATGCACTGGGTCCGCCAGGCTCCA |
| | | GGCAAGGGACTGGAGTGGGTGGCA |
| | | GTTATTTCAAATGATGGCAGTAATA |
| | | AATATTATGCAGATTCCGTGAGGG |
| | | GCCGATTCACCATCTCCAGAGACA |
| | | ATTCCAAGAACACACTGTATCTGCA |
| | | AATGGACAGCCTGAGAACTGAGGA |
| | | CACGGCTGTGTATTACTGTGCGAAA |
| | | GTTTACTATGGTTCGGGTATTTATT |
| | | ATAAAAACAGGTACTACTACGGTA |
| | | TGGACGTCTGGGGCCAAGGGACCA |
| | | CGGTCACCGTCTCCTCAGGTGGTGG |
| | | TGGTTCTGGCGGCGGCGGCTCCGGT |
| | | GGTGGTGGTTCTTCATATGAGCTGA |
| | | CTCAGCCACCCTCAGTGTCAGTGGC |
| | | CCTGGGACAGACGGCCAGGCTTAC |
| | | CTGTGAGGGAAACAACATTGGAAG |
| | | TAAAAATGTGCACTGGTACCAGCA |
| | | GAAGCCAGGCCAGGCCCCTGTGTT |
| | | GGTCATCTATAGGGATAGCAACCG |
| | | GCCCTCTGGGATCCCTGAGCGCTTC |
| | | TCTGGCTCCAAGTCGGGGAACACG |
| | | GCCACCCTGGCCATCAGCAGAGCC |
| | | CAAGCCGGGGATGAGTCTGACTAT |
| | | TACTGTCAGGTGTGGGACAGCAGT |
| | | GCCGTGGTATTCGGCGGAGGCACC |
| | | AAGCTGACCGTCCTA |
| 1189 | MPK20298-C10_SCFV | CAGGTGCAGCTGGTGGAGTCCGGG |
| | | GGAGGCGTGGTCCAGCCTGGGAGG |
| | | TCCCTGAGACTCTCCTGTGCAGCCT |
| | | CTGGATTCACCTTCAGTAGCTCTGG |
| | | CATGCACTGGGTCCGCCAGGCTCCA |
| | | GGCAAGGGGCTGGAGTGGGTGGCA |
| | | GTTATATCAAATGATGGAAGTAAT |
| | | AAATACTATGCAGACTCCGTGAAG |
| | | GGCCGATTCACCATCTCCAGAGAC |
| | | AATTCCAAGAACACGCTGTATCTGC |
| | | AAATGAACAGCCTGAGAGCTGAGG |
| | | ACACGGCTGTGTATTACTGTGCGAA |
| | | AGTTTACTATGGTTCGGGGATTTAT |
| | | TATAAAAATAACTACTATTACGGTA |
| | | TGGACGTCTGGGGCCAAGGGACCA |
| | | CGGTCACCGTCTCCTCAGGTGGTGG |
| | | TGGTTCTGGCGGCGGCGGCTCCGGT |
| | | GGTGGTGGTTCTTCATATGAGCTGA |
| | | CTCAGCCACCCTCAGTGTCAGTGGC |
| | | CCTGGGACAGACGGCCAGGATTAC |
| | | CTGTGGGGGAAACAACATTGGAAG |
| | | TAAAAATGTGCACTGGTACCAGCA |
| | | GAAGCCAGGCCAGGCCCCTGTGCT |
| | | GGCCATCTATAGGAATAGCAACCG |
| | | GCCCTCTGGGATCCCTGAGCGATTC |
| | | ACTGGCTCCAACTCGGGGAACACG |
| | | GCCACCCTGACCATCAGCGGGACC |
| | | CAGGCTATGGATGAGGCTGACTATT |
| | | ACTGTCAGGCGTGGGACAGCAGCA |
| | | CTGTGGTATTCGGCGGAGGGACCA |
| | | AGCTGACCGTCCTA |
| 1190 | MPK20298-B5_SCFV | CAGGTGCAGCTGGTGGAGTCTGGG |
| | | GGAGGCGTGGTCCAGCCTGGGAGG |
| | | TCCCTGAGACTCTCCTGTGCAGCCT |
| | | CTGGATTCAACTTCAGTAACTATGG |
| | | CATGCACTGGGTCCGCCAGGCTCCA |
| | | GGCAAGGGGCTGGAATGGGTGGCA |
| | | GTTATATCATATGATGGAAGTAATA |
| | | AATATTATGCAGACTCCGTGAAGG |
| | | GCCGATTCACCATCTCCAGAGACA |
| | | ATTCCAAGAACACGCTGTATCTACA |
| | | AATGAACAGCCTGAGAGCTGAGGA |
| | | CACGGCTGTGTATTTCTGTGCGAGA |
| | | GTTTACTATGGTTCGGGGATTTATT |
| | | ATAAAAAGAGATACTACTACGGTA |
| | | TGGACGTCTGGGGCCAAGGGACCA |
| | | CGGTCACCGTCTCCTCAGGTGGTGG |
| | | TGGTTCTGGCGGCGGCGGCTCCGGT |
| | | GGTGGTGGTTCTTCATATGAGCTGA |
| | | CTCAGCCACCCTCAGTGTCAGTGGC |
| | | CCTGGGACAGACGGCCAGGATTAC |
| | | CTGTGGGGGAAACAACATTGGAAG |
| | | TCAAAATGTGCACTGGTACCAGCA |
| | | GAAGCCAGGCCAGGCCCCTGTGCT |
| | | GGTCATCTATAGGGATAGCAACCG |
| | | GCCCTCTGGGATCCCTGAGCGCTTC |
| | | TCTGGCTCCAAGTCGGGGAACACG |
| | | GCCACCCTGGCCATCAGCAGAGCC |
| | | CAAGCCGGGGATGAGTCTGACTAT |
| | | TACTGTCAGGTGTGGGACAGCAGT |
| | | GCCGTGGTATTCGGCGGAGGCACC |
| | | CAGCTGACCGTCCTA |
| 1191 | MPK20299-F2_SCFV | CAGGTGCAGCTGGTGGAGTCCGGG |
| | | GGAGGCGTGGTCCAGCCTGGGAGG |
| | | TCCCTGAGACTCTCCTGTGCAGCCT |
| | | CTGGATTCACCCTCAGTAGCTCTGG |
| | | CATGCACTGGGTCCGCCAGGCTCCA |
| | | GGCAAGGGGCTGGAGTGGGTGGCA |
| | | GTTATATCAAATGATGGAAGTAAT |
| | | AAATACTATGCGGACTCCGTGAAG |
| | | GGCCGGTTCACCATCTCCAGAGAC |
| | | GATTCCAAGAACACACTGTATCTGC |
| | | AAATGGACAGCCTGAGAACTGAGG |
| | | ACACGGCTGTGTATTACTGTGCGAA |
| | | AGTTTACTATGGTTCGGGTATTTAT |
| | | TATAAAAACAGGTACTACTACGGG |
| | | ATGGACGTCTGGGGCCAAGGGACC |
| | | ACGGTCACCGTCTCCTCAGGTGGTG |
| | | GTGGTTCTGGCGGCGGCGGCTCCG |
| | | GTGGTGGTGGTTCTTCATATGAGCT |
| | | GACTCAGCCACCCTCAGTGTCAGTG |
| | | GCCCTGGGACAGACGGCCAGGATT |
| | | TCCTGTGGGGGAAACAACATTGGA |
| | | AGTAAAAATGTGCACTGGTACCAG |
| | | CAGAAGCCAGGCCAGGCCCCTGTG |
| | | CTGGTCATGTATAGGGATAGCAAC |
| | | CGGCCCTCAGGGATCCCTGAGCGA |
| | | TTCTCTGGCTCCAACTCTGGGAACA |
| | | CAGCCACTCTGACCATCAGCGGGA |
| | | CCCAGGCTATGGATGAGGCTGACT |
| | | ATTACTGTCAGGCGTGGGACAGCG |
| | | GCACTGTGGTATTCGGCGGAGGGA |
| | | CCAAGCTGACCGTCCTA |
| 1192 | MPK20298-D4_SCFV | CAGGTGCAGCTGGTGGAGTCTGGG |
| | | GGAGGCGTGGTCCAGCCTGGGAGG |
| | | TCCCTGAGACTCTCCTGTGCAGCCT |
| | | CTGGATTCAACTTCAGTAACTATGG |
| | | CATGCACTGGGTCCGCCAGGCTCCA |
| | | GGCAAGGGGCTGGAATGGGTGGCA |
| | | GTTATATCATATGATGGAAGTAATA |
| | | AATATTATGCAGACTCCGTGAAGG |
| | | GCCGATTCACCATCTCCAGAGACA |
| | | ATTCCAAGAACACGCTGTATCTACA |
| | | AATGAACAGCCTGAGAGCTGAGGA |
| | | CACGGCTGTGTATTTCTGTGCGAGA |
| | | GTTTACTATGGTTCGGGGATTTATT |
| | | ATAAAAAGAGATACTACTACGGTA |
| | | TGGACGTCTGGGGCCAAGGGACCA |
| | | CGGTCACCGTCTCCTCAGGTGGTGG |
| | | TGGTTCTGGCGGCGGCGGCTCCGGT |
| | | GGTGGTGGTTCTTCATATGAGCTGA |
| | | CTCAGCCACCCTCAGTGTCAGTGGC |
| | | CCTGGGACAGACGGCCAGAATTAC |
| | | CTGTGGGGGAAACAACATTGGAGG |
| | | TAAAAATGTGCACTGGTACCAGCA |
| | | GAAGCCAGGCCAGGCCCCTGTGCT |
| | | GGTCATCTATAGGGATAGCAACCG |
| | | GCCCTCTGGGATCCCTGAGCGATTC |
| | | TCTGGCTCCAAGTCGGGGAACACG |
| | | GCCACCCTGACCATCAGCAGAGCC |
| | | CAAGCCGGGGATGAGTCTGACTAT |
| | | TACTGTCAGGTGTGGGACAGCAGC |
| | | ACTGTGGTATTCGGCGGAGGCACC |
| | | CAGCTGACCGTCCTA |
| 1193 | MPK20297-F5_SCFV | CAGGTGCAGCTGGTGGAGTCTGGG |
| | | GGAGGCGTGGTCCAGCCTGGGAGG |
| | | TCCCTGAGACTCTCCTGTGTAGTCT |
| | | CTGGATTCAACTTCAGTAGGAATGG |
| | | CATGCACTGGGTCCGCCAGGTTCCA |
| | | GGCAGGGGGCTAGATTGGGTGGCA |
| | | GTTATATCAAATGATGGAAGTAAT |
| | | AAATACTATGCAGACTCCGTGAAG |
| | | GGCCGATTCACCATCTCCAGAGAC |
| | | AATTCCAAGAACACGCTGTATCTGC |
| | | AAATGAACAGCCTGAGAGCTGAGG |
| | | ACACGGCTGTGTATTACTGTGCGAA |
| | | AGTTTACTATGGTTCGGGGATTTAT |
| | | TATAAAAATAACTACTATTACGGTA |
| | | TGGACGTCTGGGGCCAAGGGACCA |
| | | CGGTCACCGTCTCCTCAGGTGGTGG |
| | | TGGTTCTGGCGGCGGCGGCTCCGGT |
| | | GGTGGTGGTTCTTCATATGAGCTGA |
| | | CTCAGCCACTCTCAGTGTCAGTGGC |
| | | CCTGGGACAGACGGCCAGGATTAC |
| | | CTGTGGGGGAAACAACATTGGAAG |
| | | TAAAAATGTGCACTGGTACCAGCA |
| | | GAAGCCAGGCCAGGCCCCTGTGCT |
| | | GGTCATCTATAGAAATAGCAACCG |
| | | GCCCTCTGGGATCCCTGAGCGATTC |
| | | TCTGGCTCCAACTCGGGGAACACG |
| | | GCCACCCTGACCATCAGCAGAGCC |
| | | CAGGCCGGGGATGAGGCTGACTAT |
| | | TACTGTCAGGTGTGGGACAGCAGC |
| | | ACTGTGGTTTTCGGCGGTGGGACCA |
| | | AGCTGACCGTCCTA |
| 1194 | MPK20299-D9_SCFV | CAGGTGCAGCTGGTGGAGTCCGGG |
| | | GGAGGCTTGGTCAAGCCTGGAGGG |
| | | TCCCTGAGACTCTCCTGTGCAGCCT |
| | | CTGGATTCAACTTCAGTAGGAATGG |
| | | CATGCACTGGGTCCGCCAGGTTCCA |
| | | GGCAGGGGGCTAGATTGGGTGGCA |
| | | GTTATATCAAATGATGGAAGTAAT |
| | | AAATACTATGCAGACTCCGTGAAG |
| | | GGCCGATTCACCATCTCCAGAGAC |
| | | AATTCCAAGAACACGCTGTATCTGC |
| | | AAATGAACAGCCTGAGAGCTGAGG |
| | | ACACGGCTGTGTATTACTGTGCGAA |
| | | AGTTTACTATGGTTCGGGGATTTAT |
| | | TATAAAAATAACTACTACTACGGTA |
| | | TGGACGTCTGGGGCCAAGGGACCA |
| | | CGGTCACCGTCTCCTCAGGTGGTGG |
| | | TGGTTCTGGCGGCGGCGGCTCCGGT |
| | | GGTGGTGGTTCTTCATATGAGCTGA |
| | | CTCAGCCACCCTCAGTGTCAGTGGC |
| | | CCTGGGACAGACGGCCAGGATTTC |
| | | CTGTGGGGGAAACAACATTGAAAG |
| | | TAAAAATGTGCACTGGTACCAGCA |
| | | GAAGCCAGGCCAGGCCCCTGTGTT |
| | | GGTCATCTATAGGGATAGCAACCG |
| | | GCCCTCTGGGATCCCTGAGCGATTC |
| | | TCTGGCTCCAAGTCGGGGACCACG |
| | | GCCACCCTGACCATCAGCAGAGCC |
| | | CAAGCCGGGGATGAGGCTGAGTAT |
| | | TACTGTCAGGTGTGGGACAGCAGC |
| | | ACTGTGGTTTTCGGCGGAGGCACCC |
| | | AGCTGACCGTCCTA |
| 1195 | huCCR8_32360_huIgG1z | ATGGACATGAGGGTGCCCGCTCAG |
| | mAb(LC:K38R)_HC | CTCCTGGGGCTCCTGCTGCTGTGGC |
| | | TGAGAGGTGCGCGCTGTGAGGTGC |
| | | AGCTGGTGGAGTCTGGGGGAGGCT |
| | | TGGTAAAGCCTGGGGGGTCCCTGA |
| | | GACTCTCCTGTGCAGCCTCTGGATT |
| | | TACTTTCAGTAACGCCCGGATGGGC |
| | | TGGGTCCGCCAGGCTCCAGGGAAG |
| | | GGGCTGGAGTGGGTTGGCCGTATT |
| | | AAAAGCAAAACTGAAGGTGGGACA |
| | | AGAGACTACGCTGCACCCGTGAAA |
| | | GGCAGATTCACCATCTCAAGAGAT |
| | | GATTCAAAAAACACGCTGTATCTGC |
| | | AAATGAACAGCCTGAAAACCGAGG |
| | | ACACAGCCGTGTATTATTGTACCTC |
| | | GTATAGTGGGGTCTGGGGCCAAGG |
| | | GACAATGGTCACCGTGTCTTCAGCC |
| | | TCCACCAAGGGCCCATCGGTCTTCC |
| | | CCCTGGCACCCTCCTCCAAGAGCAC |
| | | CTCTGGGGGCACAGCGGCCCTGGG |
| | | CTGCCTGGTCAAGGACTACTTCCCC |
| | | GAACCGGTGACGGTGTCGTGGAAC |
| | | TCAGGCGCCCTGACCAGCGGCGTG |
| | | CACACCTTCCCGGCTGTCCTACAGT |
| | | CCTCAGGACTCTACTCCCTCAGCAG |
| | | CGTGGTGACCGTGCCCTCCAGCAGC |
| | | TTGGGCACCCAGACCTACATCTGCA |
| | | ACGTGAATCACAAGCCCAGCAACA |
| | | CCAAGGTGGACAAGAAAGTTGAGC |
| | | CCAAATCTTGTGACAAAACTCACAC |
| | | ATGCCCACCGTGCCCAGCACCTGA |
| | | ACTCCTGGGGGGACCGTCAGTCTTC |
| | | CTCTTCCCCCCAAAACCCAAGGACA |
| | | CCCTCATGATCTCCCGGACCCCTGA |
| | | GGTCACATGCGTGGTGGTGGACGT |
| | | GAGCCACGAAGACCCTGAGGTCAA |
| | | GTTCAACTGGTACGTGGACGGCGT |
| | | GGAGGTGCATAATGCCAAGACAAA |
| | | GCCGCGGGAGGAGCAGTACAACAG |
| | | CACGTACCGTGTGGTCAGCGTCCTC |
| | | ACCGTCCTGCACCAGGACTGGCTG |
| | | AATGGCAAGGAGTACAAGTGCAAG |
| | | GTGTCCAACAAAGCCCTCCCAGCCC |
| | | CCATCGAGAAAACCATCTCCAAAG |
| | | CCAAAGGGCAGCCCCGAGAACCAC |
| | | AGGTGTACACCCTGCCCCCATCCCG |
| | | GGAGGAGATGACCAAGAACCAGGT |
| | | CAGCCTGACCTGCCTGGTCAAAGG |
| | | CTTCTATCCCAGCGACATCGCCGTG |
| | | GAGTGGGAGAGCAATGGGCAGCCG |
| | | GAGAACAACTACAAGACCACGCCT |
| | | CCCGTGCTGGACTCCGACGGCTCCT |
| | | TCTTCCTCTATAGCAAGCTCACCGT |
| | | GGACAAGAGCAGGTGGCAGCAGGG |
| | | GAACGTCTTCTCATGCTCCGTGATG |
| | | CATGAGGCTCTGCACAACCACTAC |
| | | ACGCAGAAGAGCCTCTCCCTGTCTC |
| | | CGGGCAAATAG |
| 1196 | huCCR8_32360_huIgG1z | ATGGACATGAGGGTGCCCGCTCAG |
| | mAb(LC:K38R)_LC | CTCCTGGGGCTCCTGCTGCTGTGGC |
| | | TGAGAGGTGCGCGCTGTGACATCG |
| | | TGATGACCCAGTCTCCAGACTCCCT |
| | | GGCTGTGTCTCTGGGCGAGAGGGC |
| | | CACCATCAACTGCAAGTCCAGCCA |
| | | GAGTGTTTTATACAGTTCCAACAAT |
| | | AGAAACTACTTAGCTTGGTACCATC |
| | | AGAAACCAGGACAGTCTCCTAAGC |
| | | TGCTCATTTCCTGGGCATCTACCCG |
| | | GGAATCCGGGGTCCCTGACCGATTC |
| | | AGTGGCAGCGGGTCTGGGACAGAT |
| | | TTCACTCTCACCATCAACAGCCTGC |
| | | AGGCTGAAGATGTGGCAGTTTATTA |
| | | CTGTCAACAATATTATAGTATTCCG |
| | | ATCACTTTCGGCGGAGGGACCAAG |
| | | GTGGAGATCAAACGAACGGTGGCT |
| | | GCACCATCTGTCTTCATCTTCCCGC |
| | | CATCTGATGAGCAGTTGAAATCTGG |
| | | AACTGCCTCTGTTGTGTGCCTGCTG |
| | | AATAACTTCTATCCCAGAGAGGCC |
| | | AAAGTACAGTGGAAGGTGGATAAC |
| | | GCCCTCCAATCGGGTAACTCCCAGG |
| | | AGAGTGTCACAGAGCAGGACAGCA |
| | | AGGACAGCACCTACAGCCTCAGCA |
| | | GCACCCTGACGCTGAGCAAAGCAG |
| | | ACTACGAGAAACACAAAGTCTACG |
| | | CCTGCGAAGTCACCCATCAGGGCCT |
| | | GAGCTCGCCCGTCACAAAGAGCTT |
| | | CAACAGGGGAGAGTGTTAG |
| 1197 | anti- | ATGGACATGAGGGTGCCCGCTCAG |
| | huCCR8_44379(VH:D72S, VL:N67A_S68A_ | CTCCTGGGGCTCCTGCTGCTGTGGC |
| | M99G_W109F_S111A)_huIgG1z (mAb)_HC | TGAGAGGTGCGCGCTGTCAGGTGC |
| | | AGCTGGTGGAGTCCGGGGGAGGCG |
| | | TGGTCCAGCCTGGGAGGTCCCTGA |
| | | GACTCTCCTGTGCAGCCTCTGGATT |
| | | CACCTTCAGTAACTATGGCTTTCAC |
| | | TGGGTCCGCCAGACTCCAGGCAAG |
| | | GGGCTGGAGTGGGTGGCAGTTATC |
| | | TCATATGATGGAAGTAATAGATACT |
| | | ATGCAAGCTCCGTGAAGGGCCGAT |
| | | TCACCATCTCCAGAGACAATTCCAA |
| | | GAACACGCTGTATCTCCAAATGAA |
| | | CAGCCTGAGAGGTGAGGACACGGC |
| | | GCTATATTACTGTGCGAGAGTTTAC |
| | | TATGGTTCGGGGACTTATTATAAAA |
| | | ACCGCTACTACTACGGTATGGACGT |
| | | CTGGGGCCAAGGGACCACGGTCAC |
| | | CGTGTCCTCAGCCTCCACCAAGGGC |
| | | CCATCGGTCTTCCCCCTGGCACCCT |
| | | CCTCCAAGAGCACCTCTGGGGGCA |
| | | CAGCGGCCCTGGGCTGCCTGGTCA |
| | | AGGACTACTTCCCCGAACCGGTGA |
| | | CGGTGTCGTGGAACTCAGGCGCCCT |
| | | GACCAGCGGCGTGCACACCTTCCC |
| | | GGCTGTCCTACAGTCCTCAGGACTC |
| | | TACTCCCTCAGCAGCGTGGTGACCG |
| | | TGCCCTCCAGCAGCTTGGGCACCCA |
| | | GACCTACATCTGCAACGTGAATCAC |
| | | AAGCCCAGCAACACCAAGGTGGAC |
| | | AAGAAAGTTGAGCCCAAATCTTGT |
| | | GACAAAACTCACACATGCCCACCG |
| | | TGCCCAGCACCTGAACTCCTGGGG |
| | | GGACCGTCAGTCTTCCTCTTCCCCC |
| | | CAAAACCCAAGGACACCCTCATGA |
| | | TCTCCCGGACCCCTGAGGTCACATG |
| | | CGTGGTGGTGGACGTGAGCCACGA |
| | | AGACCCTGAGGTCAAGTTCAACTG |
| | | GTACGTGGACGGCGTGGAGGTGCA |
| | | TAATGCCAAGACAAAGCCGCGGGA |
| | | GGAGCAGTACAACAGCACGTACCG |
| | | TGTGGTCAGCGTCCTCACCGTCCTG |
| | | CACCAGGACTGGCTGAATGGCAAG |
| | | GAGTACAAGTGCAAGGTGTCCAAC |
| | | AAAGCCCTCCCAGCCCCCATCGAG |
| | | AAAACCATCTCCAAAGCCAAAGGG |
| | | CAGCCCCGAGAACCACAGGTGTAC |
| | | ACCCTGCCCCCATCCCGGGAGGAG |
| | | ATGACCAAGAACCAGGTCAGCCTG |
| | | ACCTGCCTGGTCAAAGGCTTCTATC |
| | | CCAGCGACATCGCCGTGGAGTGGG |
| | | AGAGCAATGGGCAGCCGGAGAACA |
| | | ACTACAAGACCACGCCTCCCGTGCT |
| | | GGACTCCGACGGCTCCTTCTTCCTC |
| | | TATAGCAAGCTCACCGTGGACAAG |
| | | AGCAGGTGGCAGCAGGGGAACGTC |
| | | TTCTCATGCTCCGTGATGCATGAGG |
| | | CTCTGCACAACCACTACACGCAGA |
| | | AGAGCCTCTCCCTGTCTCCGGGCAA |
| | | ATAG |
| 1198 | anti- | ATGGCCTGGGCTCTGCTGCTCCTCA |
| | huCCR8_44379(VH:D72S, VL:N67A_S68A_ | CCCTCCTCACTCAGGGCACAGGGTC |
| | M99G_W109F_S111A)_huIgG1z (mAb)_LC | CTGGGCCTCATATGAGCTGACTCAG |
| | | CCACCCTCAGTGTCAGTGGCCCTGG |
| | | GACAGACGGCCAGGATTACCTGTG |
| | | GGGGACACAACATTGGAAGTAAAG |
| | | GTGTGCACTGGTACCAGCAGAAGC |
| | | CAGGCCAGGCCCCTGTACTGGTCAT |
| | | CTATAGAGCCGCCAACCGGCCCTCT |
| | | GGGATCCCTGAGCGATTCTCTGGCT |
| | | CCAACTCTGGGAACACAGCCACTCT |
| | | GACCATCAGCGGGACCCAGGCTGG |
| | | CGATGAGGCTGACTATTACTGTCAG |
| | | GCGTTCGACGCCGGCACTGTGGTAT |
| | | TCGGCGGAGGCACCCAGCTGACCG |
| | | TCCTAGGTCAGCCCAAGGCTGCACC |
| | | CTCGGTCACTCTGTTCCCGCCCTCC |
| | | TCTGAGGAGCTTCAAGCCAACAAG |
| | | GCCACACTGGTGTGTCTCATCAGTG |
| | | ACTTCTACCCGGGAGCCGTGACAGT |
| | | GGCCTGGAAGGCAGATAGCAGCCC |
| | | CGTCAAGGCGGGAGTGGAAACCAC |
| | | CACACCCTCCAAACAAAGCAACAA |
| | | CAAGTACGCGGCCAGCAGCTATCT |
| | | GAGCCTGACGCCTGAGCAGTGGAA |
| | | GTCCCACAGAAGCTACAGCTGCCA |
| | | GGTCACGCATGAAGGGAGCACCGT |
| | | GGAGAAGACAGTGGCCCCTACAGA |
| | | ATGTTCATAG |
| 1199 | anti- | ATGGACATGAGGGTGCCCGCTCAG |
| | huCCR8_44379(VH:D61A_D72A, VL:N67Q_ | CTCCTGGGGCTCCTGCTGCTGTGGC |
| | M99E_W109F_S111A)_huIgG1z | TGAGAGGTGCGCGCTGTCAGGTGC |
| | (mAb)_HC | AGCTGGTGGAGTCCGGGGGAGGCG |
| | | TGGTCCAGCCTGGGAGGTCCCTGA |
| | | GACTCTCCTGTGCAGCCTCTGGATT |
| | | CACCTTCAGTAACTATGGCTTTCAC |
| | | TGGGTCCGCCAGACTCCAGGCAAG |
| | | GGGCTGGAGTGGGTGGCAGTTATC |
| | | TCATATGCCGGAAGTAATAGATACT |
| | | ATGCAGCCTCCGTGAAGGGCCGAT |
| | | TCACCATCTCCAGAGACAATTCCAA |
| | | GAACACGCTGTATCTCCAAATGAA |
| | | CAGCCTGAGAGGTGAGGACACGGC |
| | | GCTATATTACTGTGCGAGAGTTTAC |
| | | TATGGTTCGGGGACTTATTATAAAA |
| | | ACCGCTACTACTACGGTATGGACGT |
| | | CTGGGGCCAAGGGACCACGGTCAC |
| | | CGTGTCCTCAGCCTCCACCAAGGGC |
| | | CCATCGGTCTTCCCCCTGGCACCCT |
| | | CCTCCAAGAGCACCTCTGGGGGCA |
| | | CAGCGGCCCTGGGCTGCCTGGTCA |
| | | AGGACTACTTCCCCGAACCGGTGA |
| | | CGGTGTCGTGGAACTCAGGCGCCCT |
| | | GACCAGCGGCGTGCACACCTTCCC |
| | | GGCTGTCCTACAGTCCTCAGGACTC |
| | | TACTCCCTCAGCAGCGTGGTGACCG |
| | | TGCCCTCCAGCAGCTTGGGCACCCA |
| | | GACCTACATCTGCAACGTGAATCAC |
| | | AAGCCCAGCAACACCAAGGTGGAC |
| | | AAGAAAGTTGAGCCCAAATCTTGT |
| | | GACAAAACTCACACATGCCCACCG |
| | | TGCCCAGCACCTGAACTCCTGGGG |
| | | GGACCGTCAGTCTTCCTCTTCCCCC |
| | | CAAAACCCAAGGACACCCTCATGA |
| | | TCTCCCGGACCCCTGAGGTCACATG |
| | | CGTGGTGGTGGACGTGAGCCACGA |
| | | AGACCCTGAGGTCAAGTTCAACTG |
| | | GTACGTGGACGGCGTGGAGGTGCA |
| | | TAATGCCAAGACAAAGCCGCGGGA |
| | | GGAGCAGTACAACAGCACGTACCG |
| | | TGTGGTCAGCGTCCTCACCGTCCTG |
| | | CACCAGGACTGGCTGAATGGCAAG |
| | | GAGTACAAGTGCAAGGTGTCCAAC |
| | | AAAGCCCTCCCAGCCCCCATCGAG |
| | | AAAACCATCTCCAAAGCCAAAGGG |
| | | CAGCCCCGAGAACCACAGGTGTAC |
| | | ACCCTGCCCCCATCCCGGGAGGAG |
| | | ATGACCAAGAACCAGGTCAGCCTG |
| | | ACCTGCCTGGTCAAAGGCTTCTATC |
| | | CCAGCGACATCGCCGTGGAGTGGG |
| | | AGAGCAATGGGCAGCCGGAGAACA |
| | | ACTACAAGACCACGCCTCCCGTGCT |
| | | GGACTCCGACGGCTCCTTCTTCCTC |
| | | TATAGCAAGCTCACCGTGGACAAG |
| | | AGCAGGTGGCAGCAGGGGAACGTC |
| | | TTCTCATGCTCCGTGATGCATGAGG |
| | | CTCTGCACAACCACTACACGCAGA |
| | | AGAGCCTCTCCCTGTCTCCGGGCAA |
| | | ATAG |
| 1200 | anti- | ATGGCCTGGGCTCTGCTGCTCCTCA |
| | huCCR8_44379(VH:D61A_D72A, VL:N67Q_ | CCCTCCTCACTCAGGGCACAGGGTC |
| | M99E_W109F_S111A)_huIgG1z | CTGGGCCTCATATGAGCTGACTCAG |
| | (mAb)_LC | CCACCCTCAGTGTCAGTGGCCCTGG |
| | | GACAGACGGCCAGGATTACCTGTG |
| | | GGGGACACAACATTGGAAGTAAAG |
| | | GTGTGCACTGGTACCAGCAGAAGC |
| | | CAGGCCAGGCCCCTGTACTGGTCAT |
| | | CTATAGACAGAGCAACCGGCCCTC |
| | | TGGGATCCCTGAGCGATTCTCTGGC |
| | | TCCAACTCTGGGAACACAGCCACTC |
| | | TGACCATCAGCGGGACCCAGGCTG |
| | | AAGATGAGGCTGACTATTACTGTCA |
| | | GGCGTTCGACGCCGGCACTGTGGT |
| | | ATTCGGCGGAGGCACCCAGCTGAC |
| | | CGTCCTAGGTCAGCCCAAGGCTGC |
| | | ACCCTCGGTCACTCTGTTCCCGCCC |
| | | TCCTCTGAGGAGCTTCAAGCCAACA |
| | | AGGCCACACTGGTGTGTCTCATCAG |
| | | TGACTTCTACCCGGGAGCCGTGACA |
| | | GTGGCCTGGAAGGCAGATAGCAGC |
| | | CCCGTCAAGGCGGGAGTGGAAACC |
| | | ACCACACCCTCCAAACAAAGCAAC |
| | | AACAAGTACGCGGCCAGCAGCTAT |
| | | CTGAGCCTGACGCCTGAGCAGTGG |
| | | AAGTCCCACAGAAGCTACAGCTGC |
| | | CAGGTCACGCATGAAGGGAGCACC |
| | | GTGGAGAAGACAGTGGCCCCTACA |
| | | GAATGTTCATAG |
| 1201 | anti- | ATGGACATGAGGGTGCCCGCTCAG |
| | huCCR8_44379(VH:D61S, VL:N67Q_M99G_ | CTCCTGGGGCTCCTGCTGCTGTGGC |
| | W109F_S111A)_huIgG1z (mAb)_HC | TGAGAGGTGCGCGCTGTCAGGTGC |
| | | AGCTGGTGGAGTCCGGGGGAGGCG |
| | | TGGTCCAGCCTGGGAGGTCCCTGA |
| | | GACTCTCCTGTGCAGCCTCTGGATT |
| | | CACCTTCAGTAACTATGGCTTTCAC |
| | | TGGGTCCGCCAGACTCCAGGCAAG |
| | | GGGCTGGAGTGGGTGGCAGTTATC |
| | | TCATATAGCGGAAGTAATAGATAC |
| | | TATGCAGACTCCGTGAAGGGCCGA |
| | | TTCACCATCTCCAGAGACAATTCCA |
| | | AGAACACGCTGTATCTCCAAATGA |
| | | ACAGCCTGAGAGGTGAGGACACGG |
| | | CGCTATATTACTGTGCGAGAGTTTA |
| | | CTATGGTTCGGGGACTTATTATAAA |
| | | AACCGCTACTACTACGGTATGGAC |
| | | GTCTGGGGCCAAGGGACCACGGTC |
| | | ACCGTGTCCTCAGCCTCCACCAAGG |
| | | GCCCATCGGTCTTCCCCCTGGCACC |
| | | CTCCTCCAAGAGCACCTCTGGGGGC |
| | | ACAGCGGCCCTGGGCTGCCTGGTC |
| | | AAGGACTACTTCCCCGAACCGGTG |
| | | ACGGTGTCGTGGAACTCAGGCGCC |
| | | CTGACCAGCGGCGTGCACACCTTCC |
| | | CGGCTGTCCTACAGTCCTCAGGACT |
| | | CTACTCCCTCAGCAGCGTGGTGACC |
| | | GTGCCCTCCAGCAGCTTGGGCACCC |
| | | AGACCTACATCTGCAACGTGAATC |
| | | ACAAGCCCAGCAACACCAAGGTGG |
| | | ACAAGAAAGTTGAGCCCAAATCTT |
| | | GTGACAAAACTCACACATGCCCAC |
| | | CGTGCCCAGCACCTGAACTCCTGGG |
| | | GGGACCGTCAGTCTTCCTCTTCCCC |
| | | CCAAAACCCAAGGACACCCTCATG |
| | | ATCTCCCGGACCCCTGAGGTCACAT |
| | | GCGTGGTGGTGGACGTGAGCCACG |
| | | AAGACCCTGAGGTCAAGTTCAACT |
| | | GGTACGTGGACGGCGTGGAGGTGC |
| | | ATAATGCCAAGACAAAGCCGCGGG |
| | | AGGAGCAGTACAACAGCACGTACC |
| | | GTGTGGTCAGCGTCCTCACCGTCCT |
| | | GCACCAGGACTGGCTGAATGGCAA |
| | | GGAGTACAAGTGCAAGGTGTCCAA |
| | | CAAAGCCCTCCCAGCCCCCATCGA |
| | | GAAAACCATCTCCAAAGCCAAAGG |
| | | GCAGCCCCGAGAACCACAGGTGTA |
| | | CACCCTGCCCCCATCCCGGGAGGA |
| | | GATGACCAAGAACCAGGTCAGCCT |
| | | GACCTGCCTGGTCAAAGGCTTCTAT |
| | | CCCAGCGACATCGCCGTGGAGTGG |
| | | GAGAGCAATGGGCAGCCGGAGAAC |
| | | AACTACAAGACCACGCCTCCCGTG |
| | | CTGGACTCCGACGGCTCCTTCTTCC |
| | | TCTATAGCAAGCTCACCGTGGACA |
| | | AGAGCAGGTGGCAGCAGGGGAACG |
| | | TCTTCTCATGCTCCGTGATGCATGA |
| | | GGCTCTGCACAACCACTACACGCA |
| | | GAAGAGCCTCTCCCTGTCTCCGGGC |
| | | AAATAG |
| 1202 | anti- | ATGGCCTGGGCTCTGCTGCTCCTCA |
| | huCCR8_44379(VH:D61S, VL:N67Q_M99G_ | CCCTCCTCACTCAGGGCACAGGGTC |
| | W109F_S111A)_huIgG1z (mAb)_LC | CTGGGCCTCATATGAGCTGACTCAG |
| | | CCACCCTCAGTGTCAGTGGCCCTGG |
| | | GACAGACGGCCAGGATTACCTGTG |
| | | GGGGACACAACATTGGAAGTAAAG |
| | | GTGTGCACTGGTACCAGCAGAAGC |
| | | CAGGCCAGGCCCCTGTACTGGTCAT |
| | | CTATAGACAGAGCAACCGGCCCTC |
| | | TGGGATCCCTGAGCGATTCTCTGGC |
| | | TCCAACTCTGGGAACACAGCCACTC |
| | | TGACCATCAGCGGGACCCAGGCTG |
| | | GCGATGAGGCTGACTATTACTGTCA |
| | | GGCGTTCGACGCCGGCACTGTGGT |
| | | ATTCGGCGGAGGCACCCAGCTGAC |
| | | CGTCCTAGGTCAGCCCAAGGCTGC |
| | | ACCCTCGGTCACTCTGTTCCCGCCC |
| | | TCCTCTGAGGAGCTTCAAGCCAACA |
| | | AGGCCACACTGGTGTGTCTCATCAG |
| | | TGACTTCTACCCGGGAGCCGTGACA |
| | | GTGGCCTGGAAGGCAGATAGCAGC |
| | | CCCGTCAAGGCGGGAGTGGAAACC |
| | | ACCACACCCTCCAAACAAAGCAAC |
| | | AACAAGTACGCGGCCAGCAGCTAT |
| | | CTGAGCCTGACGCCTGAGCAGTGG |
| | | AAGTCCCACAGAAGCTACAGCTGC |
| | | CAGGTCACGCATGAAGGGAGCACC |
| | | GTGGAGAAGACAGTGGCCCCTACA |
| | | GAATGTTCATAG |
| 1203 | Hu anti-huCCR8 LIBC315615-1 HuIgG1z | ATGGCCTGGGCTCTGCTGCTCCTCA |
| | mAb_LC | CCCTCCTCACTCAGGGCACAGGGTC |
| | | CTGGGCCTCCTATGAACTGACTCAG |
| | | CCACTCTCAGTGTCAGTGGCCCTGG |
| | | GACAGACGGCCAGGATTACCTGTG |
| | | GGGGACACAACATTGGAAGTAAAG |
| | | GTGTGCACTGGTACCAGCAGAAGC |
| | | CAGGCCAGGCCCCTGTGCTGGTCAT |
| | | CTATAGAAATAGCAACCGGCCCTCT |
| | | GGGATCCCTGAGCGATTCTCTGGCT |
| | | CCAACTCGGGGAACACGGCCACCC |
| | | TGACCATCAGCAGAGCCCAAGCCG |
| | | GGGATGAGGCTGACTATTACTGTCA |
| | | GGTGTGGGACATCAGCACTGTGGTT |
| | | TTCGGCGGAGGGACCGAGCTGACC |
| | | GTCCTAGGTCAGCCCAAGGCTGCA |
| | | CCCTCGGTCACTCTGTTCCCGCCCT |
| | | CCTCTGAGGAGCTTCAAGCCAACA |
| | | AGGCCACACTGGTGTGTCTCATCAG |
| | | TGACTTCTACCCGGGAGCCGTGACA |
| | | GTGGCCTGGAAGGCAGATAGCAGC |
| | | CCCGTCAAGGCGGGAGTGGAAACC |
| | | ACCACACCCTCCAAACAAAGCAAC |
| | | AACAAGTACGCGGCCAGCAGCTAT |
| | | CTGAGCCTGACGCCTGAGCAGTGG |
| | | AAGTCCCACAGAAGCTACAGCTGC |
| | | CAGGTCACGCATGAAGGGAGCACC |
| | | GTGGAGAAGACAGTGGCCCCTACA |
| | | GAATGTTCATAG |
| 1204 | Hu anti-huCCR8 LIBC315615-1 HuIgG1z | ATGGACATGAGGGTGCCCGCTCAG |
| | mAb_HC | CTCCTGGGGCTCCTGCTGCTGTGGC |
| | | TGAGAGGTGCGCGCTGTCAGGTGC |
| | | AGCTGGTGGAGTCTGGGGGAGGCG |
| | | TGGCCCAGCCTGGGAGGTCCCTGA |
| | | GACTCTCCTGTGCAGCCTCTGGATT |
| | | CAACTTCAGTAACTGTGGCATGCAC |
| | | TGGGTCCGCCAGGCTCCAGGCAAG |
| | | GGGCTGGAGTGGGTGGCAGTTATA |
| | | TCATATGATGGAGGTAATAAATATC |
| | | ATGCGGACTCCGTGAAGGGCCGGT |
| | | TCACCATCTCCAGAGACGATTCCAA |
| | | GAACACACTGTATCTGCAAATGGA |
| | | CAGCCTGAGAACTGAGGACACGGC |
| | | TGTGTATTACTGTGCGAAAGTTTAC |
| | | TATGGTTCGGGTATTTATTATAAAA |
| | | ACAGGTACTACTACGGGATGGACG |
| | | TCtGGGGCCAAGGGACCACGGTCAC |
| | | CGTCTCCTCAGCCTCCACCAAGGGC |
| | | CCATCGGTCTTCCCCCTGGCACCCT |
| | | CCTCCAAGAGCACCTCTGGGGGCA |
| | | CAGCGGCCCTGGGCTGCCTGGTCA |
| | | AGGACTACTTCCCCGAACCGGTGA |
| | | CGGTGTCGTGGAACTCAGGCGCCCT |
| | | GACCAGCGGCGTGCACACCTTCCC |
| | | GGCTGTCCTACAGTCCTCAGGACTC |
| | | TACTCCCTCAGCAGCGTGGTGACCG |
| | | TGCCCTCCAGCAGCTTGGGCACCCA |
| | | GACCTACATCTGCAACGTGAATCAC |
| | | AAGCCCAGCAACACCAAGGTGGAC |
| | | AAGAAAGTTGAGCCCAAATCTTGT |
| | | GACAAAACTCACACATGCCCACCG |
| | | TGCCCAGCACCTGAACTCCTGGGG |
| | | GGACCGTCAGTCTTCCTCTTCCCCC |
| | | CAAAACCCAAGGACACCCTCATGA |
| | | TCTCCCGGACCCCTGAGGTCACATG |
| | | CGTGGTGGTGGACGTGAGCCACGA |
| | | AGACCCTGAGGTCAAGTTCAACTG |
| | | GTACGTGGACGGCGTGGAGGTGCA |
| | | TAATGCCAAGACAAAGCCGCGGGA |
| | | GGAGCAGTACAACAGCACGTACCG |
| | | TGTGGTCAGCGTCCTCACCGTCCTG |
| | | CACCAGGACTGGCTGAATGGCAAG |
| | | GAGTACAAGTGCAAGGTGTCCAAC |
| | | AAAGCCCTCCCAGCCCCCATCGAG |
| | | AAAACCATCTCCAAAGCCAAAGGG |
| | | CAGCCCCGAGAACCACAGGTGTAC |
| | | ACCCTGCCCCCATCCCGGGAGGAG |
| | | ATGACCAAGAACCAGGTCAGCCTG |
| | | ACCTGCCTGGTCAAAGGCTTCTATC |
| | | CCAGCGACATCGCCGTGGAGTGGG |
| | | AGAGCAATGGGCAGCCGGAGAACA |
| | | ACTACAAGACCACGCCTCCCGTGCT |
| | | GGACTCCGACGGCTCCTTCTTCCTC |
| | | TATAGCAAGCTCACCGTGGACAAG |
| | | AGCAGGTGGCAGCAGGGGAACGTC |
| | | TTCTCATGCTCCGTGATGCATGAGG |
| | | CTCTGCACAACCACTACACGCAGA |
| | | AGAGCCTCTCCCTGTCTCCGGGCAA |
| | | ATAG |
| 1205 | Hu anti-huCCR8 LIBC317152-1 HuIgG1z | ATGGCCTGGGCTCTGCTGCTCCTCA |
| | mAb_LC | CCCTCCTCACTCAGGGCACAGGGTC |
| | | CTGGGCCTCCTATGAGCTGACTCAG |
| | | CCACTCTCAGTGTCAGTGGCCCTGG |
| | | GACAGACGGCCAGGATTACCTGTG |
| | | GGGGACACAACATTGGAAGTAAAG |
| | | GTGTGCACTGGTACCAGCAGAAGC |
| | | CAGGCCAGGCCCCTGTGCTGGTCAT |
| | | CTATAGAAATAGCAACCGGCCCTCT |
| | | GGGATCCCTGAGCGATTCTCTGGCT |
| | | CCAACTCGGGGAAAACGGCCACCC |
| | | TGACCATCAGCAGAGCCCAAGCCG |
| | | GGGATGAGGCTGACTATTACTGTCA |
| | | GGTGTGGGACAGCAGCACTGTGGT |
| | | TTTCGGCGGAGGGACCGAGCTGAC |
| | | CGTCCTAGGTCAGCCCAAGGCTGC |
| | | ACCCTCGGTCACTCTGTTCCCGCCC |
| | | TCCTCTGAGGAGCTTCAAGCCAACA |
| | | AGGCCACACTGGTGTGTCTCATCAG |
| | | TGACTTCTACCCGGGAGCCGTGACA |
| | | GTGGCCTGGAAGGCAGATAGCAGC |
| | | CCCGTCAAGGCGGGAGTGGAAACC |
| | | ACCACACCCTCCAAACAAAGCAAC |
| | | AACAAGTACGCGGCCAGCAGCTAT |
| | | CTGAGCCTGACGCCTGAGCAGTGG |
| | | AAGTCCCACAGAAGCTACAGCTGC |
| | | CAGGTCACGCATGAAGGGAGCACC |
| | | GTGGAGAAGACAGTGGCCCCTACA |
| | | GAATGTTCATAG |
| 1206 | Hu anti-huCCR8 LIBC317152-1 HuIgG1z | ATGGACATGAGGGTGCCCGCTCAG |
| | mAb_HC | CTCCTGGGGCTCCTGCTGCTGTGGC |
| | | TGAGAGGTGCGCGCTGTCAGGTGC |
| | | AGCTGGTGGAGTCTGGGGGAGGCG |
| | | TGGCCCAGCCTGGGAGGTCCCTGA |
| | | GACTCTCCTGTGCAGCCTCTGGATT |
| | | CAACTTCAGTAACTGTGGCATGCAC |
| | | TGGGTCCGCCAGGCTCCAGGCAAG |
| | | GGGCTGGAGTGGGTGGCAGTTATA |
| | | TCATATGATGGAGGTAATAAATATT |
| | | ATGCGGACTCCGTGAAGGGCCGGT |
| | | TCACCATCTCCAGAGACGATTCCAA |
| | | GAACACACTGTATCTGCAAATGGA |
| | | CAGCCTGAGAACTGAGGACACGGC |
| | | TGTGTATTACTGTGCGAAAGTTTAC |
| | | TATGGTTCGGGTATTTATTATAAAA |
| | | ACAGGTATTACTACGGGATGGACG |
| | | TCTGGGGCCAAGGGACCACGGTCA |
| | | CCGTCTCCTCAGCCTCCACCAAGGG |
| | | CCCATCGGTCTTCCCCCTGGCACCC |
| | | TCCTCCAAGAGCACCTCTGGGGGC |
| | | ACAGCGGCCCTGGGCTGCCTGGTC |
| | | AAGGACTACTTCCCCGAACCGGTG |
| | | ACGGTGTCGTGGAACTCAGGCGCC |
| | | CTGACCAGCGGCGTGCACACCTTCC |
| | | CGGCTGTCCTACAGTCCTCAGGACT |
| | | CTACTCCCTCAGCAGCGTGGTGACC |
| | | GTGCCCTCCAGCAGCTTGGGCACCC |
| | | AGACCTACATCTGCAACGTGAATC |
| | | ACAAGCCCAGCAACACCAAGGTGG |
| | | ACAAGAAAGTTGAGCCCAAATCTT |
| | | GTGACAAAACTCACACATGCCCAC |
| | | CGTGCCCAGCACCTGAACTCCTGGG |
| | | GGGACCGTCAGTCTTCCTCTTCCCC |
| | | CCAAAACCCAAGGACACCCTCATG |
| | | ATCTCCCGGACCCCTGAGGTCACAT |
| | | GCGTGGTGGTGGACGTGAGCCACG |
| | | AAGACCCTGAGGTCAAGTTCAACT |
| | | GGTACGTGGACGGCGTGGAGGTGC |
| | | ATAATGCCAAGACAAAGCCGCGGG |
| | | AGGAGCAGTACAACAGCACGTACC |
| | | GTGTGGTCAGCGTCCTCACCGTCCT |
| | | GCACCAGGACTGGCTGAATGGCAA |
| | | GGAGTACAAGTGCAAGGTGTCCAA |
| | | CAAAGCCCTCCCAGCCCCCATCGA |
| | | GAAAACCATCTCCAAAGCCAAAGG |
| | | GCAGCCCCGAGAACCACAGGTGTA |
| | | CACCCTGCCCCCATCCCGGGAGGA |
| | | GATGACCAAGAACCAGGTCAGCCT |
| | | GACCTGCCTGGTCAAAGGCTTCTAT |
| | | CCCAGCGACATCGCCGTGGAGTGG |
| | | GAGAGCAATGGGCAGCCGGAGAAC |
| | | AACTACAAGACCACGCCTCCCGTG |
| | | CTGGACTCCGACGGCTCCTTCTTCC |
| | | TCTATAGCAAGCTCACCGTGGACA |
| | | AGAGCAGGTGGCAGCAGGGGAACG |
| | | TCTTCTCATGCTCCGTGATGCATGA |
| | | GGCTCTGCACAACCACTACACGCA |
| | | GAAGAGCCTCTCCCTGTCTCCGGGC |
| | | AAATAG |
| 1207 | Hu anti-huCCR8 LIBC317471-1 HuIgG1z | ATGGCCTGGGCTCTGCTGCTCCTCA |
| | mAb_LC | CCCTCCTCACTCAGGGCACAGGGTC |
| | | CTGGGCCTCCTATGAGCTGACTCAG |
| | | CCACTCTCAGTGTCAGTGGCCCTGG |
| | | GACAGACGGCCAGGATTACCTGTG |
| | | GGGGAAACAACATTGGAAGTAAAA |
| | | ATGTGCACTGGTACCAGAAGAGGC |
| | | CAGGCCAGGCCCCTGTGCTGGTCAT |
| | | CTATAGGGATAGCAACCGGCCCTCT |
| | | GGGATCCCTGAGCGATTCTCTGGCT |
| | | CCAAGTCGGGGAACACGGCCACCC |
| | | TGACCATCAGCAGAGCCCAAGCCG |
| | | GGGATGAGGCTGACTATTACTGTCA |
| | | GGTGTGGGACAGCAACACTGTGGT |
| | | TTTCGGCGGAGGGACCAACCTGAC |
| | | CGTCCTAGGTCAGCCCAAGGCTGC |
| | | ACCCTCGGTCACTCTGTTCCCGCCC |
| | | TCCTCTGAGGAGCTTCAAGCCAACA |
| | | AGGCCACACTGGTGTGTCTCATCAG |
| | | TGACTTCTACCCGGGAGCCGTGACA |
| | | GTGGCCTGGAAGGCAGATAGCAGC |
| | | CCCGTCAAGGCGGGAGTGGAAACC |
| | | ACCACACCCTCCAAACAAAGCAAC |
| | | AACAAGTACGCGGCCAGCAGCTAT |
| | | CTGAGCCTGACGCCTGAGCAGTGG |
| | | AAGTCCCACAGAAGCTACAGCTGC |
| | | CAGGTCACGCATGAAGGGAGCACC |
| | | GTGGAGAAGACAGTGGCCCCTACA |
| | | GAATGTTCATAG |
| 1208 | Hu anti-huCCR8 LIBC317471-1 HuIgG1z | ATGGACATGAGGGTGCCCGCTCAG |
| | mAb_HC | CTCCTGGGGCTCCTGCTGCTGTGGC |
| | | TGAGAGGTGCGCGCTGTCAGGTGC |
| | | AGCTGGTGGAGTCTGGGGGAGGCG |
| | | TGGTCCAGCCTGGGAGGTCCCTGA |
| | | GACTCTCCTGTGTAGTCTCTGGATT |
| | | CAACTTCAGTAACAATGGCATGCA |
| | | CTGGGTCCGCCAGGCTCCAGGCAA |
| | | GGGACTGGAGTGGGTGGCAGTTAT |
| | | TTCAAATGATGGCAGTAATAAATAT |
| | | TATGCAGATTCCGTGAGGGGCCGA |
| | | TTCACCATCTCCAGAGACAATTCCA |
| | | AGAACACGCTGTATCTGCAAATGA |
| | | ACAGCCTGAGAGCTGAGGACACGG |
| | | CTGTGTATTCCTGTGCGAAAGTTTA |
| | | CTATGGTTCGGGAATTTATTACAAA |
| | | AATAACTACTACTACGGTATGGAC |
| | | GTCTGGGGCCAAGGGACCACGGTC |
| | | ACCGTCTCCTCAGCCTCCACCAAGG |
| | | GCCCATCGGTCTTCCCCCTGGCACC |
| | | CTCCTCCAAGAGCACCTCTGGGGGC |
| | | ACAGCGGCCCTGGGCTGCCTGGTC |
| | | AAGGACTACTTCCCCGAACCGGTG |
| | | ACGGTGTCGTGGAACTCAGGCGCC |
| | | CTGACCAGCGGCGTGCACACCTTCC |
| | | CGGCTGTCCTACAGTCCTCAGGACT |
| | | CTACTCCCTCAGCAGCGTGGTGACC |
| | | GTGCCCTCCAGCAGCTTGGGCACCC |
| | | AGACCTACATCTGCAACGTGAATC |
| | | ACAAGCCCAGCAACACCAAGGTGG |
| | | ACAAGAAAGTTGAGCCCAAATCTT |
| | | GTGACAAAACTCACACATGCCCAC |
| | | CGTGCCCAGCACCTGAACTCCTGGG |
| | | GGGACCGTCAGTCTTCCTCTTCCCC |
| | | CCAAAACCCAAGGACACCCTCATG |
| | | ATCTCCCGGACCCCTGAGGTCACAT |
| | | GCGTGGTGGTGGACGTGAGCCACG |
| | | AAGACCCTGAGGTCAAGTTCAACT |
| | | GGTACGTGGACGGCGTGGAGGTGC |
| | | ATAATGCCAAGACAAAGCCGCGGG |
| | | AGGAGCAGTACAACAGCACGTACC |
| | | GTGTGGTCAGCGTCCTCACCGTCCT |
| | | GCACCAGGACTGGCTGAATGGCAA |
| | | GGAGTACAAGTGCAAGGTGTCCAA |
| | | CAAAGCCCTCCCAGCCCCCATCGA |
| | | GAAAACCATCTCCAAAGCCAAAGG |
| | | GCAGCCCCGAGAACCACAGGTGTA |
| | | CACCCTGCCCCCATCCCGGGAGGA |
| | | GATGACCAAGAACCAGGTCAGCCT |
| | | GACCTGCCTGGTCAAAGGCTTCTAT |
| | | CCCAGCGACATCGCCGTGGAGTGG |
| | | GAGAGCAATGGGCAGCCGGAGAAC |
| | | AACTACAAGACCACGCCTCCCGTG |
| | | CTGGACTCCGACGGCTCCTTCTTCC |
| | | TCTATAGCAAGCTCACCGTGGACA |
| | | AGAGCAGGTGGCAGCAGGGGAACG |
| | | TCTTCTCATGCTCCGTGATGCATGA |
| | | GGCTCTGCACAACCACTACACGCA |
| | | GAAGAGCCTCTCCCTGTCTCCGGGC |
| | | AAATAG |
| 1209 | Hu anti-huCCR8 LIBC317977-1 HuIgG1z | ATGGCCTGGGCTCTGCTGCTCCTCA |
| | mAb_LC | CCCTCCTCACTCAGGGCACAGGGTC |
| | | CTGGGCCTcctATGAGCTGACTCAGC |
| | | CACTCTCAGTGTCAGTGGCCCTGGG |
| | | ACAGACGGCCAGGATTACCTGTGG |
| | | GGGAAACAACATTGGAAGTAAAAA |
| | | TGTGCACTGGTACCAGCAGAAGGC |
| | | AGGCCAGGCCCCTGTGCAGGTCAT |
| | | CTATAGAAATAGCAACCGGCCCTCT |
| | | GGGATCCCTGAGCGATTCTCTGGCT |
| | | CCAACTCGGGGAACACGGCCACCC |
| | | TGACCATCAGCAGAGCCCAGGCCG |
| | | GGGATGAGGCTGACTATTACTGTCA |
| | | GGTGTGGGACAGCAGCACTGTGGT |
| | | TTTCGGCGGTGGGACCAAGCTGAC |
| | | CGTCCTAGGTCAGCCCAAGGCTGC |
| | | ACCCTCGGTCACTCTGTTCCCGCCC |
| | | TCCTCTGAGGAGCTTCAAGCCAACA |
| | | AGGCCACACTGGTGTGTCTCATCAG |
| | | TGACTTCTACCCGGGAGCCGTGACA |
| | | GTGGCCTGGAAGGCAGATAGCAGC |
| | | CCCGTCAAGGCGGGAGTGGAAACC |
| | | ACCACACCCTCCAAACAAAGCAAC |
| | | AACAAGTACGCGGCCAGCAGCTAT |
| | | CTGAGCCTGACGCCTGAGCAGTGG |
| | | AAGTCCCACAGAAGCTACAGCTGC |
| | | CAGGTCACGCATGAAGGGAGCACC |
| | | GTGGAGAAGACAGTGGCCCCTACA |
| | | GAATGTTCATAG |
| 1210 | Hu anti-huCCR8 LIBC317977-1 HuIgG1z | ATGGACATGAGGGTGCCCGCTCAG |
| | mAb_HC | CTCCTGGGGCTCCTGCTGCTGTGGC |
| | | TGAGAGGTGCGCGCTGTCAGGTGC |
| | | AGCTGGTGGAGTCTGGGGGAGGCG |
| | | TGGTCCAGCCTGGGAGGTCCCTGA |
| | | GACTCTCCTGTGCAGCCTCTGGATT |
| | | CAACTTCAATACCTATGGCATGCAC |
| | | TGGGTCCGCCAGGCTCCAGGCAAG |
| | | GGGCTGGAGTGGGTGGCAGTTATA |
| | | TCATATGATGGAAGTAATAAATATT |
| | | ATGCAGACTCCGTGAAGGGCCGAT |
| | | TCACCATCTCCAGAGACAATTCCAA |
| | | GAGCACGCTGTATCTGCAAATGAA |
| | | CAGCCTGAGAGCTGAGGACACGGC |
| | | TGTGTATTACTGTGCGAGAGTTTAC |
| | | TATGGTTCGGGGAGTTATTATAAAA |
| | | AGAATTACTACTACGGTATGGACGT |
| | | CTGGGGCCAAGGGACCACGGTCAC |
| | | CGTCTCCTCAGCCTCCACCAAGGGC |
| | | CCATCGGTCTTCCCCCTGGCACCCT |
| | | CCTCCAAGAGCACCTCTGGGGGCA |
| | | CAGCGGCCCTGGGCTGCCTGGTCA |
| | | AGGACTACTTCCCCGAACCGGTGA |
| | | CGGTGTCGTGGAACTCAGGCGCCCT |
| | | GACCAGCGGCGTGCACACCTTCCC |
| | | GGCTGTCCTACAGTCCTCAGGACTC |
| | | TACTCCCTCAGCAGCGTGGTGACCG |
| | | TGCCCTCCAGCAGCTTGGGCACCCA |
| | | GACCTACATCTGCAACGTGAATCAC |
| | | AAGCCCAGCAACACCAAGGTGGAC |
| | | AAGAAAGTTGAGCCCAAATCTTGT |
| | | GACAAAACTCACACATGCCCACCG |
| | | TGCCCAGCACCTGAACTCCTGGGG |
| | | GGACCGTCAGTCTTCCTCTTCCCCC |
| | | CAAAACCCAAGGACACCCTCATGA |
| | | TCTCCCGGACCCCTGAGGTCACATG |
| | | CGTGGTGGTGGACGTGAGCCACGA |
| | | AGACCCTGAGGTCAAGTTCAACTG |
| | | GTACGTGGACGGCGTGGAGGTGCA |
| | | TAATGCCAAGACAAAGCCGCGGGA |
| | | GGAGCAGTACAACAGCACGTACCG |
| | | TGTGGTCAGCGTCCTCACCGTCCTG |
| | | CACCAGGACTGGCTGAATGGCAAG |
| | | GAGTACAAGTGCAAGGTGTCCAAC |
| | | AAAGCCCTCCCAGCCCCCATCGAG |
| | | AAAACCATCTCCAAAGCCAAAGGG |
| | | CAGCCCCGAGAACCACAGGTGTAC |
| | | ACCCTGCCCCCATCCCGGGAGGAG |
| | | ATGACCAAGAACCAGGTCAGCCTG |
| | | ACCTGCCTGGTCAAAGGCTTCTATC |
| | | CCAGCGACATCGCCGTGGAGTGGG |
| | | AGAGCAATGGGCAGCCGGAGAACA |
| | | ACTACAAGACCACGCCTCCCGTGCT |
| | | GGACTCCGACGGCTCCTTCTTCCTC |
| | | TATAGCAAGCTCACCGTGGACAAG |
| | | AGCAGGTGGCAGCAGGGGAACGTC |
| | | TTCTCATGCTCCGTGATGCATGAGG |
| | | CTCTGCACAACCACTACACGCAGA |
| | | AGAGCCTCTCCCTGTCTCCGGGCAA |
| | | ATAG |
| 1211 | Hu anti-huCCR8 LIBC318774-1 HuIgG1z | ATGGCCTGGGCTCTGCTGCTCCTCA |
| | mAb_LC | CCCTCCTCACTCAGGGCACAGGGTC |
| | | CTGGGCCTCCTATGAGCTGACTCAG |
| | | CCACTCTCAGTGTCAGTGGCCCTGG |
| | | GACAGACGGCCAGGATTACCTGTG |
| | | GGGGAAACAACATTGGAGGTAAAA |
| | | ATGTGCACTGGTACCAGCAGAAGC |
| | | CAGGCCAGGCCCCTGTGCTGGTCAT |
| | | CTATAGGGATAGCAACCGGCCCTCT |
| | | GGGATCCCTGAGCGATTCTCTGGCT |
| | | CCAAGTCGGGGAACACGGCCACCC |
| | | TGACCATCAGCAGAGCCCAAGCCG |
| | | GGGATGAGTCTGACTATTACTGTCA |
| | | GGTTTGGGACAGCAGCACTGTGGT |
| | | ATTCGGCGGAGGGACCACGCTGAC |
| | | CGTCCTAGGTCAGCCCAAGGCTGC |
| | | ACCCTCGGTCACTCTGTTCCCGCCC |
| | | TCCTCTGAGGAGCTTCAAGCCAACA |
| | | AGGCCACACTGGTGTGTCTCATCAG |
| | | TGACTTCTACCCGGGAGCCGTGACA |
| | | GTGGCCTGGAAGGCAGATAGCAGC |
| | | CCCGTCAAGGCGGGAGTGGAAACC |
| | | ACCACACCCTCCAAACAAAGCAAC |
| | | AACAAGTACGCGGCCAGCAGCTAT |
| | | CTGAGCCTGACGCCTGAGCAGTGG |
| | | AAGTCCCACAGAAGCTACAGCTGC |
| | | CAGGTCACGCATGAAGGGAGCACC |
| | | GTGGAGAAGACAGTGGCCCCTACA |
| | | GAATGTTCATAG |
| 1212 | Hu anti-huCCR8 LIBC318774-1 HuIgG1z | ATGGACATGAGGGTGCCCGCTCAG |
| | mAb_HC | CTCCTGGGGCTCCTGCTGCTGTGGC |
| | | TGAGAGGTGCGCGCTGTCAGGTGC |
| | | AGGTGGTGGAGTCTGGGGGAGGCG |
| | | TGGTCCAGCCTGGGAGGTCCCTGA |
| | | GACTCTCCTGTGCAGCCTCTGGATT |
| | | CACCCTCAGTAGTTATGGCTTTCAC |
| | | TGGGTCCGCCAGACTCCAGGCAAG |
| | | GGGCTGGAGTGGGTGGCAGTTATA |
| | | TCATATGATGGAAGTAATAAATAct |
| | | ATGCAGACTCCGTGAAGGGCCGAT |
| | | TCACCATCTCCAGAGACAATTCCAA |
| | | GAACACGCTGTATCTCCAAATGAA |
| | | CAGCCTGAGAGGTGAGGACACGGC |
| | | GGTGTATTACTGTGCGAGAGTTTAC |
| | | TATGGTTCGGGGACTTATTATAAAA |
| | | ACCGCTACTACTACGGTATGGACGT |
| | | CTGGGGCCAAGGGACCACGGTCAC |
| | | CGTCTCCTCAGCCTCCACCAAGGGC |
| | | CCATCGGTCTTCCCCCTGGCACCCT |
| | | CCTCCAAGAGCACCTCTGGGGGCA |
| | | CAGCGGCCCTGGGCTGCCTGGTCA |
| | | AGGACTACTTCCCCGAACCGGTGA |
| | | CGGTGTCGTGGAACTCAGGCGCCCT |
| | | GACCAGCGGCGTGCACACCTTCCC |
| | | GGCTGTCCTACAGTCCTCAGGACTC |
| | | TACTCCCTCAGCAGCGTGGTGACCG |
| | | TGCCCTCCAGCAGCTTGGGCACCCA |
| | | GACCTACATCTGCAACGTGAATCAC |
| | | AAGCCCAGCAACACCAAGGTGGAC |
| | | AAGAAAGTTGAGCCCAAATCTTGT |
| | | GACAAAACTCACACATGCCCACCG |
| | | TGCCCAGCACCTGAACTCCTGGGG |
| | | GGACCGTCAGTCTTCCTCTTCCCCC |
| | | CAAAACCCAAGGACACCCTCATGA |
| | | TCTCCCGGACCCCTGAGGTCACATG |
| | | CGTGGTGGTGGACGTGAGCCACGA |
| | | AGACCCTGAGGTCAAGTTCAACTG |
| | | GTACGTGGACGGCGTGGAGGTGCA |
| | | TAATGCCAAGACAAAGCCGCGGGA |
| | | GGAGCAGTACAACAGCACGTACCG |
| | | TGTGGTCAGCGTCCTCACCGTCCTG |
| | | CACCAGGACTGGCTGAATGGCAAG |
| | | GAGTACAAGTGCAAGGTGTCCAAC |
| | | AAAGCCCTCCCAGCCCCCATCGAG |
| | | AAAACCATCTCCAAAGCCAAAGGG |
| | | CAGCCCCGAGAACCACAGGTGTAC |
| | | ACCCTGCCCCCATCCCGGGAGGAG |
| | | ATGACCAAGAACCAGGTCAGCCTG |
| | | ACCTGCCTGGTCAAAGGCTTCTATC |
| | | CCAGCGACATCGCCGTGGAGTGGG |
| | | AGAGCAATGGGCAGCCGGAGAACA |
| | | ACTACAAGACCACGCCTCCCGTGCT |
| | | GGACTCCGACGGCTCCTTCTTCCTC |
| | | TATAGCAAGCTCACCGTGGACAAG |
| | | AGCAGGTGGCAGCAGGGGAACGTC |
| | | TTCTCATGCTCCGTGATGCATGAGG |
| | | CTCTGCACAACCACTACACGCAGA |
| | | AGAGCCTCTCCCTGTCTCCGGGCAA |
| | | ATAG |
| 1213 | Hu anti-huCCR8 LIBC319840-1 HuIgG1z | ATGGCCTGGGCTCTGCTGCTCCTCA |
| | mAb_LC | CCCTCCTCACTCAGGGCACAGGGTC |
| | | CTGGGCCTCCTATGAGCTGACTCAG |
| | | CCACTCTCAGTGTCAGAGGCCCTGG |
| | | GACAGACGGCCAGGATTACCTGTG |
| | | GGGGAAACAACATTGGAAGTAAAA |
| | | ATGTGCACTGGTACCAGCAGAAGC |
| | | CAGGCCAGGCCCCTGTACTGGTCAT |
| | | CTATAGGGATAGCAACCGGCCCTCT |
| | | GGGATCCCTGAGCGATTCTCTGGCT |
| | | CCAAGTCGGGGAACACGGCCACCC |
| | | TGACCATCAGCAGAGCCCAAGCCG |
| | | GGGATGAGGCTGACTATTACTGTCA |
| | | GGTGTGGGACAGCAGCACTGTGGT |
| | | TTTCGGCGGAGGGACCAAGGTGAC |
| | | CGTCCTAGGTCAGCCCAAGGCTGC |
| | | ACCCTCGGTCACTCTGTTCCCGCCC |
| | | TCCTCTGAGGAGCTTCAAGCCAACA |
| | | AGGCCACACTGGTGTGTCTCATCAG |
| | | TGACTTCTACCCGGGAGCCGTGACA |
| | | GTGGCCTGGAAGGCAGATAGCAGC |
| | | CCCGTCAAGGCGGGAGTGGAAACC |
| | | ACCACACCCTCCAAACAAAGCAAC |
| | | AACAAGTACGCGGCCAGCAGCTAT |
| | | CTGAGCCTGACGCCTGAGCAGTGG |
| | | AAGTCCCACAGAAGCTACAGCTGC |
| | | CAGGTCACGCATGAAGGGAGCACC |
| | | GTGGAGAAGACAGTGGCCCCTACA |
| | | GAATGTTCATAG |
| 1214 | Hu anti-huCCR8 LIBC319840-1 HuIgG1z | ATGGACATGAGGGTGCCCGCTCAG |
| | mAb_HC | CTCCTGGGGCTCCTGCTGCTGTGGC |
| | | TGAGAGGTGCGCGCTGTCAGGTGC |
| | | AGCTGGTGGAGTCTGGGGGAGGCG |
| | | TGGTCCAGCCTGGGAGGTCCCTGA |
| | | GACTCTCCTGTGTAGTCTCTGGATT |
| | | CAACTTCATTAACAATGGCATGCAC |
| | | TGGGTCCGCCAGGCTCCAGGCAAG |
| | | GGGCTGGACTGGGTGGCAGTTATA |
| | | TCAAATGATGGAAGTAATAAATAC |
| | | TATCCAGACTCCGTGAAGGGCCGA |
| | | TTCACCATCTCCAGAGACAATTCCA |
| | | AGAACACGCTGTATCTGCAAATGA |
| | | ACAGCCTGAGAGCTGAGGACTCGG |
| | | CTGTGTATTACTGTGCGAAAGTTTA |
| | | CTATGGTTCGGGAAATTATTATAAA |
| | | AACAACTACTACTACGGTATGGAC |
| | | GTCTGGGGCCAAGGGACCACGGTC |
| | | ACCGTCTCCTCAGCCTCCACCAAGG |
| | | GCCCATCGGTCTTCCCCCTGGCACC |
| | | CTCCTCCAAGAGCACCTCTGGGGGC |
| | | ACAGCGGCCCTGGGCTGCCTGGTC |
| | | AAGGACTACTTCCCCGAACCGGTG |
| | | ACGGTGTCGTGGAACTCAGGCGCC |
| | | CTGACCAGCGGCGTGCACACCTTCC |
| | | CGGCTGTCCTACAGTCCTCAGGACT |
| | | CTACTCCCTCAGCAGCGTGGTGACC |
| | | GTGCCCTCCAGCAGCTTGGGCACCC |
| | | AGACCTACATCTGCAACGTGAATC |
| | | ACAAGCCCAGCAACACCAAGGTGG |
| | | ACAAGAAAGTTGAGCCCAAATCTT |
| | | GTGACAAAACTCACACATGCCCAC |
| | | CGTGCCCAGCACCTGAACTCCTGGG |
| | | GGGACCGTCAGTCTTCCTCTTCCCC |
| | | CCAAAACCCAAGGACACCCTCATG |
| | | ATCTCCCGGACCCCTGAGGTCACAT |
| | | GCGTGGTGGTGGACGTGAGCCACG |
| | | AAGACCCTGAGGTCAAGTTCAACT |
| | | GGTACGTGGACGGCGTGGAGGTGC |
| | | ATAATGCCAAGACAAAGCCGCGGG |
| | | AGGAGCAGTACAACAGCACGTACC |
| | | GTGTGGTCAGCGTCCTCACCGTCCT |
| | | GCACCAGGACTGGCTGAATGGCAA |
| | | GGAGTACAAGTGCAAGGTGTCCAA |
| | | CAAAGCCCTCCCAGCCCCCATCGA |
| | | GAAAACCATCTCCAAAGCCAAAGG |
| | | GCAGCCCCGAGAACCACAGGTGTA |
| | | CACCCTGCCCCCATCCCGGGAGGA |
| | | GATGACCAAGAACCAGGTCAGCCT |
| | | GACCTGCCTGGTCAAAGGCTTCTAT |
| | | CCCAGCGACATCGCCGTGGAGTGG |
| | | GAGAGCAATGGGCAGCCGGAGAAC |
| | | AACTACAAGACCACGCCTCCCGTG |
| | | CTGGACTCCGACGGCTCCTTCTTCC |
| | | TCTATAGCAAGCTCACCGTGGACA |
| | | AGAGCAGGTGGCAGCAGGGGAACG |
| | | TCTTCTCATGCTCCGTGATGCATGA |
| | | GGCTCTGCACAACCACTACACGCA |
| | | GAAGAGCCTCTCCCTGTCTCCGGGC |
| | | AAATAG |
| 1215 | Hu anti-huCCR8 LIBC320212-1 HuIgG1z | ATGGCCTGGGCTCTGCTGCTCCTCA |
| | mAb_LC | CCCTCCTCACTCAGGGCACAGGGTC |
| | | CTGGGCCTCCTATGAGCTGACTCAG |
| | | CCACTCTCAGTGTCAGTGGCCCTGG |
| | | GACAGACGGCCAGGATTACCTGTG |
| | | AGGGAAACAACATTGGAAGTCAAA |
| | | ATGTGCACTGGTACCAGCAGAAGC |
| | | CAGGCCAGGCCCCTGTGCTGGTCAT |
| | | GTATAGGGATAGCAACCGGCCCTC |
| | | TGGGATCCCTGAACGATTCTCTGGC |
| | | TCCAAGTCGGGGAACACGGCCACC |
| | | CTGGCCATCAGCAGAGCCCAAGCC |
| | | GGGGATGAGTCTGACTATTACTGTC |
| | | AGGTGTGGGACGGCAGTGCCGTGG |
| | | TATTCGGCGGAGGGACCACGCTGA |
| | | CCGTCCTAGGTCAGCCCAAGGCTGC |
| | | ACCCTCGGTCACTCTGTTCCCGCCC |
| | | TCCTCTGAGGAGCTTCAAGCCAACA |
| | | AGGCCACACTGGTGTGTCTCATCAG |
| | | TGACTTCTACCCGGGAGCCGTGACA |
| | | GTGGCCTGGAAGGCAGATAGCAGC |
| | | CCCGTCAAGGCGGGAGTGGAAACC |
| | | ACCACACCCTCCAAACAAAGCAAC |
| | | AACAAGTACGCGGCCAGCAGCTAT |
| | | CTGAGCCTGACGCCTGAGCAGTGG |
| | | AAGTCCCACAGAAGCTACAGCTGC |
| | | CAGGTCACGCATGAAGGGAGCACC |
| | | GTGGAGAAGACAGTGGCCCCTACA |
| | | GAATGTTCATAG |
| 1216 | Hu anti-huCCR8 LIBC320212-1 HuIgG1z | ATGGACATGAGGGTGCCCGCTCAG |
| | mAb_HC | CTCCTGGGGCTCCTGCTGCTGTGGC |
| | | TGAGAGGTGCGCGCTGTCAGATGC |
| | | AGGTGGTGGAGTCTGGGGGAGGCG |
| | | TGGTCCAGCCTGGGAGGTCCCTGA |
| | | GACTCTCCTGTGCAGCCTCTGGATT |
| | | CACCTTCAGTAGCTCTGGCATGCAC |
| | | TGGGTCCGCCAGGCTCCAGGCAAG |
| | | GGCCTGGAGTGGGTGGCAGTTATA |
| | | TCACATGATGGAAGTAATAAATAC |
| | | TATGCAGACTCCGTGAAGGGCCGA |
| | | TTCACCATCTCCAGAGACAATTCCA |
| | | AGAACACGCTGTATCTGCAAATGA |
| | | ATAGCCTGGGAGGTGAGGACACGG |
| | | CGGTGTATTACTGTGCGAAAGTTTA |
| | | CTATGGTTCGGGGATTTATTATAAA |
| | | AACCGCTATTACTACGGTATGGACG |
| | | TCTGGGGCCAAGGGACCACGGTCA |
| | | TCGTCTCGTCAGCCTCCACCAAGGG |
| | | CCCATCGGTCTTCCCCCTGGCACCC |
| | | TCCTCCAAGAGCACCTCTGGGGGC |
| | | ACAGCGGCCCTGGGCTGCCTGGTC |
| | | AAGGACTACTTCCCCGAACCGGTG |
| | | ACGGTGTCGTGGAACTCAGGCGCC |
| | | CTGACCAGCGGCGTGCACACCTTCC |
| | | CGGCTGTCCTACAGTCCTCAGGACT |
| | | CTACTCCCTCAGCAGCGTGGTGACC |
| | | GTGCCCTCCAGCAGCTTGGGCACCC |
| | | AGACCTACATCTGCAACGTGAATC |
| | | ACAAGCCCAGCAACACCAAGGTGG |
| | | ACAAGAAAGTTGAGCCCAAATCTT |
| | | GTGACAAAACTCACACATGCCCAC |
| | | CGTGCCCAGCACCTGAACTCCTGGG |
| | | GGGACCGTCAGTCTTCCTCTTCCCC |
| | | CCAAAACCCAAGGACACCCTCATG |
| | | ATCTCCCGGACCCCTGAGGTCACAT |
| | | GCGTGGTGGTGGACGTGAGCCACG |
| | | AAGACCCTGAGGTCAAGTTCAACT |
| | | GGTACGTGGACGGCGTGGAGGTGC |
| | | ATAATGCCAAGACAAAGCCGCGGG |
| | | AGGAGCAGTACAACAGCACGTACC |
| | | GTGTGGTCAGCGTCCTCACCGTCCT |
| | | GCACCAGGACTGGCTGAATGGCAA |
| | | GGAGTACAAGTGCAAGGTGTCCAA |
| | | CAAAGCCCTCCCAGCCCCCATCGA |
| | | GAAAACCATCTCCAAAGCCAAAGG |
| | | GCAGCCCCGAGAACCACAGGTGTA |
| | | CACCCTGCCCCCATCCCGGGAGGA |
| | | GATGACCAAGAACCAGGTCAGCCT |
| | | GACCTGCCTGGTCAAAGGCTTCTAT |
| | | CCCAGCGACATCGCCGTGGAGTGG |
| | | GAGAGCAATGGGCAGCCGGAGAAC |
| | | AACTACAAGACCACGCCTCCCGTG |
| | | CTGGACTCCGACGGCTCCTTCTTCC |
| | | TCTATAGCAAGCTCACCGTGGACA |
| | | AGAGCAGGTGGCAGCAGGGGAACG |
| | | TCTTCTCATGCTCCGTGATGCATGA |
| | | GGCTCTGCACAACCACTACACGCA |
| | | GAAGAGCCTCTCCCTGTCTCCGGGC |
| | | AAATAG |
| 1217 | Hu anti-huCCR8 LIBC320384-1 HuIgG1z | ATGGCCTGGGCTCTGCTGCTCCTCA |
| | mAb_LC | CCCTCCTCACTCAGGGCACAGGGTC |
| | | CTGGGCCTCCTATGAGCTGACTCAG |
| | | CCACTCTCAGTGTCAGTGGCCCTGG |
| | | GACAGACGGCCAGGATTACCTGTG |
| | | GGGGACACAACATTGGAAGTAAAG |
| | | GTGTGCACTGGTACCAGCAGAAGC |
| | | CAGGCCAGGCCCCTGTGCTGGTCAT |
| | | CTATAGAAATAGCAACCGGCCCTCT |
| | | GGGATCCCTGAGCGATTCTCTGGCT |
| | | CCAACTCGGGGAACACGGCCACCC |
| | | TGACCATCAGCAGAGCCCAAGCCG |
| | | GGGATGAGGCTGACTATTACTGTCA |
| | | GGTGTGGGACAGCAGCACTGTGGT |
| | | TTTCGGCGGAGGGACCGAGCTGAC |
| | | CGTCCTAGGTCAGCCCAAGGCTGC |
| | | ACCCTCGGTCACTCTGTTCCCGCCC |
| | | TCCTCTGAGGAGCTTCAAGCCAACA |
| | | AGGCCACACTGGTGTGTCTCATCAG |
| | | TGACTTCTACCCGGGAGCCGTGACA |
| | | GTGGCCTGGAAGGCAGATAGCAGC |
| | | CCCGTCAAGGCGGGAGTGGAAACC |
| | | ACCACACCCTCCAAACAAAGCAAC |
| | | AACAAGTACGCGGCCAGCAGCTAT |
| | | CTGAGCCTGACGCCTGAGCAGTGG |
| | | AAGTCCCACAGAAGCTACAGCTGC |
| | | CAGGTCACGCATGAAGGGAGCACC |
| | | GTGGAGAAGACAGTGGCCCCTACA |
| | | GAATGTTCATAG |
| 1218 | Hu anti-huCCR8 LIBC320384-1 HuIgG1z | ATGGACATGAGGGTGCCCGCTCAG |
| | mAb_HC | CTCCTGGGGCTCCTGCTGCTGTGGC |
| | | TGAGAGGTGCGCGCTGTCAGGTGC |
| | | AGctGGTGGAGtctGGGGGAGGCGTG |
| | | GCCCAGCCTGGGAGGTCCCTGAGA |
| | | CTCTCCTGTGCAGCCTCTGGATTCA |
| | | ACTTCAGTGattGTGGCATGCACTGG |
| | | GTCCGCCaggCTCCAGGCAAGGGGC |
| | | TGGAGTGGGTGGCAGTTATATCATA |
| | | TGATGGAGGTAATAAATATTATGC |
| | | GGACTCCGTGAAGGGCCGGTTCAC |
| | | CATCTCCAGAGacgATTCCAAGAAC |
| | | ACACTGTAtcTGCAAacggacAGCCTG |
| | | AGAACTGAGGACACGGCTGTGTAT |
| | | TACTGTGCGAAAGTTTACTATGGTT |
| | | CGGGTATTTATTATAAAAACAGGTA |
| | | CTACTACGGGATGGACGTctggggCC |
| | | AAGGGACCACGGTcaccgTCTCCTCA |
| | | GCCTCCACCAAGGGCCCATCGGTCT |
| | | TCCCCCTGGCACCCTCCTCCAAGAG |
| | | CACCTCTGGGGGCACAGCGGCCCT |
| | | GGGCTGCCTGGTCAAGGACTACTTC |
| | | CCCGAACCGGTGACGGTGTCGTGG |
| | | AACTCAGGCGCCCTGACCAGCGGC |
| | | GTGCACACCTTCCCGGCTGTCCTAC |
| | | AGTCCTCAGGACTCTACTCCCTCAG |
| | | CAGCGTGGTGACCGTGCCCTCCAGC |
| | | AGCTTGGGCACCCAGACCTACATCT |
| | | GCAACGTGAATCACAAGCCCAGCA |
| | | ACACCAAGGTGGACAAGAAAGTTG |
| | | AGCCCAAATCTTGTGACAAAACTC |
| | | ACACATGCCCACCGTGCCCAGCAC |
| | | CTGAACTCCTGGGGGGACCGTCAG |
| | | TCTTCCTCTTCCCCCCAAAACCCAA |
| | | GGACACCCTCATGATCTCCCGGACC |
| | | CCTGAGGTCACATGCGTGGTGGTG |
| | | GACGTGAGCCACGAAGACCCTGAG |
| | | GTCAAGTTCAACTGGTACGTGGAC |
| | | GGCGTGGAGGTGCATAATGCCAAG |
| | | ACAAAGCCGCGGGAGGAGCAGTAC |
| | | AACAGCACGTACCGTGTGGTCAGC |
| | | GTCCTCACCGTCCTGCACCAGGACT |
| | | GGCTGAATGGCAAGGAGTACAAGT |
| | | GCAAGGTGTCCAACAAAGCCCTCC |
| | | CAGCCCCCATCGAGAAAACCATCT |
| | | CCAAAGCCAAAGGGCAGCCCCGAG |
| | | AACCACAGGTGTACACCCTGCCCCC |
| | | ATCCCGGGAGGAGATGACCAAGAA |
| | | CCAGGTCAGCCTGACCTGCCTGGTC |
| | | AAAGGCTTCTATCCCAGCGACATCG |
| | | CCGTGGAGTGGGAGAGCAATGGGC |
| | | AGCCGGAGAACAACTACAAGACCA |
| | | CGCCTCCCGTGCTGGACTCCGACGG |
| | | CTCCTTCTTCCTCTATAGCAAGCTC |
| | | ACCGTGGACAAGAGCAGGTGGCAG |
| | | CAGGGGAACGTCTTCTCATGCTCCG |
| | | TGATGCATGAGGCTCTGCACAACC |
| | | ACTACACGCAGAAGAGCCTCTCCCT |
| | | GTCTCCGGGCAAATAG |
| 1219 | Hu anti-huCCR8 LIBC320689-1 HuIgG1z | ATGGCCTGGGCTCTGCTGCTCCTCA |
| | mAb_LC | CCCTCCTCACTCAGGGCACAGGGTC |
| | | CTGGGCCTCCTATGAGCTGACTCAG |
| | | CCACTCTCAGTGTCAGTGGCCCTGG |
| | | GACAGACGGGCAGGATTACCTGTG |
| | | GGGGAAACAACATTGGAAGTAAAA |
| | | ATGTGCACTGGTACCAGCAGAAGC |
| | | CAGGCCAGGCCCCTGTGCTGGTCAT |
| | | CTATAGGAGTAGCAACCGGCCCTCT |
| | | GGGATCCCTGAGCGATTCTCTGGCT |
| | | CCAACTCGGGGAACACGGCCACCC |
| | | TGACCATCAGCAGAGCCCAAGCCG |
| | | GGGATGAGTCTGACTATTACTGTCA |
| | | AATATGGGACAGCAGCACTGTGGT |
| | | ATTCGGCGGAGGGACCAAGCTGAC |
| | | CGTCCTAGGTCAGCCCAAGGCTGC |
| | | ACCCTCGGTCACTCTGTTCCCGCCC |
| | | TCCTCTGAGGAGCTTCAAGCCAACA |
| | | AGGCCACACTGGTGTGTCTCATCAG |
| | | TGACTTCTACCCGGGAGCCGTGACA |
| | | GTGGCCTGGAAGGCAGATAGCAGC |
| | | CCCGTCAAGGCGGGAGTGGAAACC |
| | | ACCACACCCTCCAAACAAAGCAAC |
| | | AACAAGTACGCGGCCAGCAGCTAT |
| | | CTGAGCCTGACGCCTGAGCAGTGG |
| | | AAGTCCCACAGAAGCTACAGCTGC |
| | | CAGGTCACGCATGAAGGGAGCACC |
| | | GTGGAGAAGACAGTGGCCCCTACA |
| | | GAATGTTCATAG |
| 1220 | Hu anti-huCCR8 LIBC320689-1 HuIgG1z | ATGGACATGAGGGTGCCCGCTCAG |
| | mAb_HC | CTCCTGGGGCTCCTGCTGCTGTGGC |
| | | TGAGAGGTGCGCGCTGTCAGGTGC |
| | | AGGTGGTGGAGTCTGGGGGAGGCG |
| | | TGGTCCAGCCTGGGAGGTCCCTGA |
| | | GACTCTCCTGTGCAGCCTCTGGATT |
| | | CACCTTCAGTAGCTATGGCATGCAC |
| | | TGGGTCCGCCAGGCTCCAGGCAAG |
| | | GGGCTGGAGTGGGTGGCAGTTATA |
| | | TCATTTGATGGAAATAATAAATACT |
| | | ATGCAGACTCCGTGAAGGGCCGAT |
| | | TCACCATCTCCAGAGACAATTCCAA |
| | | GAACACGCTATATCTGCAAATGAA |
| | | CAGCCTGAGAGGTGAGGACACGGC |
| | | GGTGTATTACTGTGCGAGAGTTTAT |
| | | TATGGTTCGGGGAGTTATTATAAAA |
| | | ACCGCTACTACTACGGTATGGACGT |
| | | CTGGGGCCAAGGGACCACGGTCAC |
| | | CGTCTCCACAGCCTCCACCAAGGGC |
| | | CCATCGGTCTTCCCCCTGGCACCCT |
| | | CCTCCAAGAGCACCTCTGGGGGCA |
| | | CAGCGGCCCTGGGCTGCCTGGTCA |
| | | AGGACTACTTCCCCGAACCGGTGA |
| | | CGGTGTCGTGGAACTCAGGCGCCCT |
| | | GACCAGCGGCGTGCACACCTTCCC |
| | | GGCTGTCCTACAGTCCTCAGGACTC |
| | | TACTCCCTCAGCAGCGTGGTGACCG |
| | | TGCCCTCCAGCAGCTTGGGCACCCA |
| | | GACCTACATCTGCAACGTGAATCAC |
| | | AAGCCCAGCAACACCAAGGTGGAC |
| | | AAGAAAGTTGAGCCCAAATCTTGT |
| | | GACAAAACTCACACATGCCCACCG |
| | | TGCCCAGCACCTGAACTCCTGGGG |
| | | GGACCGTCAGTCTTCCTCTTCCCCC |
| | | CAAAACCCAAGGACACCCTCATGA |
| | | TCTCCCGGACCCCTGAGGTCACATG |
| | | CGTGGTGGTGGACGTGAGCCACGA |
| | | AGACCCTGAGGTCAAGTTCAACTG |
| | | GTACGTGGACGGCGTGGAGGTGCA |
| | | TAATGCCAAGACAAAGCCGCGGGA |
| | | GGAGCAGTACAACAGCACGTACCG |
| | | TGTGGTCAGCGTCCTCACCGTCCTG |
| | | CACCAGGACTGGCTGAATGGCAAG |
| | | GAGTACAAGTGCAAGGTGTCCAAC |
| | | AAAGCCCTCCCAGCCCCCATCGAG |
| | | AAAACCATCTCCAAAGCCAAAGGG |
| | | CAGCCCCGAGAACCACAGGTGTAC |
| | | ACCCTGCCCCCATCCCGGGAGGAG |
| | | ATGACCAAGAACCAGGTCAGCCTG |
| | | ACCTGCCTGGTCAAAGGCTTCTATC |
| | | CCAGCGACATCGCCGTGGAGTGGG |
| | | AGAGCAATGGGCAGCCGGAGAACA |
| | | ACTACAAGACCACGCCTCCCGTGCT |
| | | GGACTCCGACGGCTCCTTCTTCCTC |
| | | TATAGCAAGCTCACCGTGGACAAG |
| | | AGCAGGTGGCAGCAGGGGAACGTC |
| | | TTCTCATGCTCCGTGATGCATGAGG |
| | | CTCTGCACAACCACTACACGCAGA |
| | | AGAGCCTCTCCCTGTCTCCGGGCAA |
| | | ATAG |
| 1221 | Hu anti-huCCR8 LIBC321408-1 HuIgG1z | ATGGCCTGGGCTCTGCTGCTCCTCA |
| | mAb_LC | CCCTCCTCACTCAGGGCACAGGGTC |
| | | CTGGGCCTCCTATGAACTGACTCAG |
| | | CCACTCTCAGTGTCAGTGGCCCTGG |
| | | GACAGACGGCCAGGATTACCTGTG |
| | | GGGGAAACAACATTGGAAGTAAAA |
| | | ATGTACACTGGTACCAGCAGAGGC |
| | | CAGGCCAGGCCCCTGTGTTGGTCAT |
| | | CTACAGGGATAGCAACCGGCCCTC |
| | | TGGGATCCCTGAGCGATTATCTGGC |
| | | TCCAAAGCGGGGAACACGGCCACC |
| | | CTGACCATCAGCAGAGCCCACGCC |
| | | GGGGATGAGGCTGACTATTACTGTC |
| | | AGGTGTGGGACAGCAGCACTGTGG |
| | | TTTTCGGCGGAGGGACCGAGCTGA |
| | | CCGTCCAAGGTCAGCCCAAGGCTG |
| | | CACCCTCGGTCACTCTGTTCCCGCC |
| | | CTCCTCTGAGGAGCTTCAAGCCAAC |
| | | AAGGCCACACTGGTGTGTCTCATCA |
| | | GTGACTTCTACCCGGGAGCCGTGAC |
| | | AGTGGCCTGGAAGGCAGATAGCAG |
| | | CCCCGTCAAGGCGGGAGTGGAAAC |
| | | CACCACACCCTCCAAACAAAGCAA |
| | | CAACAAGTACGCGGCCAGCAGCTA |
| | | TCTGAGCCTGACGCCTGAGCAGTG |
| | | GAAGTCCCACAGAAGCTACAGCTG |
| | | CCAGGTCACGCATGAAGGGAGCAC |
| | | CGTGGAGAAGACAGTGGCCCCTAC |
| | | AGAATGTTCATAG |
| 1222 | Hu anti-huCCR8 LIBC321408-1 HuIgG1z | ATGGACATGAGGGTGCCCGCTCAG |
| | mAb_HC | CTCCTGGGGCTCCTGCTGCTGTGGC |
| | | TGAGAGGTGCGCGCTGTCAGGTGC |
| | | AATTGGTGGAGTCTGGGGGAGGCG |
| | | TGGTCCAGCCTGGGAGGTCTCTGAG |
| | | ACTCTCCTGTGCAGTCTCTGGATTC |
| | | ACGTTCAGTAGCAATGGCATGCACT |
| | | GGGTCCGCCAGGCTCCAGGCAAGG |
| | | GGCTGGAGTGGGTGGCAGTTATAT |
| | | CAAATGATGGAAGTAATAAATATT |
| | | ATGGAGACTCCGTGAAGGGCCGAT |
| | | TCACCATCTCCAGAGACAATTCCAA |
| | | GAACACGCTGTATCTGCAAATGAA |
| | | CAGCCTGAGAGCTGAGGACACGGC |
| | | TGTGTATTACTGTGCGAAAGTTTAC |
| | | TATGGTTCGGGAATTTATTACAGAA |
| | | ACAACTACTACTACGGTATGGACGT |
| | | CTGGGGCCAAGGGACCACGGTCAC |
| | | CGTCTCCTCAGCCTCCACCAAGGGC |
| | | CCATCGGTCTTCCCCCTGGCACCCT |
| | | CCTCCAAGAGCACCTCTGGGGGCA |
| | | CAGCGGCCCTGGGCTGCCTGGTCA |
| | | AGGACTACTTCCCCGAACCGGTGA |
| | | CGGTGTCGTGGAACTCAGGCGCCCT |
| | | GACCAGCGGCGTGCACACCTTCCC |
| | | GGCTGTCCTACAGTCCTCAGGACTC |
| | | TACTCCCTCAGCAGCGTGGTGACCG |
| | | TGCCCTCCAGCAGCTTGGGCACCCA |
| | | GACCTACATCTGCAACGTGAATCAC |
| | | AAGCCCAGCAACACCAAGGTGGAC |
| | | AAGAAAGTTGAGCCCAAATCTTGT |
| | | GACAAAACTCACACATGCCCACCG |
| | | TGCCCAGCACCTGAACTCCTGGGG |
| | | GGACCGTCAGTCTTCCTCTTCCCCC |
| | | CAAAACCCAAGGACACCCTCATGA |
| | | TCTCCCGGACCCCTGAGGTCACATG |
| | | CGTGGTGGTGGACGTGAGCCACGA |
| | | AGACCCTGAGGTCAAGTTCAACTG |
| | | GTACGTGGACGGCGTGGAGGTGCA |
| | | TAATGCCAAGACAAAGCCGCGGGA |
| | | GGAGCAGTACAACAGCACGTACCG |
| | | TGTGGTCAGCGTCCTCACCGTCCTG |
| | | CACCAGGACTGGCTGAATGGCAAG |
| | | GAGTACAAGTGCAAGGTGTCCAAC |
| | | AAAGCCCTCCCAGCCCCCATCGAG |
| | | AAAACCATCTCCAAAGCCAAAGGG |
| | | CAGCCCCGAGAACCACAGGTGTAC |
| | | ACCCTGCCCCCATCCCGGGAGGAG |
| | | ATGACCAAGAACCAGGTCAGCCTG |
| | | ACCTGCCTGGTCAAAGGCTTCTATC |
| | | CCAGCGACATCGCCGTGGAGTGGG |
| | | AGAGCAATGGGCAGCCGGAGAACA |
| | | ACTACAAGACCACGCCTCCCGTGCT |
| | | GGACTCCGACGGCTCCTTCTTCCTC |
| | | TATAGCAAGCTCACCGTGGACAAG |
| | | AGCAGGTGGCAGCAGGGGAACGTC |
| | | TTCTCATGCTCCGTGATGCATGAGG |
| | | CTCTGCACAACCACTACACGCAGA |
| | | AGAGCCTCTCCCTGTCTCCGGGCAA |
| | | ATAG |
| 1223 | Hu anti-huCCR8 LIBC321824-1 HuIgG1z | ATGGCCTGGGCTCTGCTGCTCCTCA |
| | mAb_LC | CCCTCCTCACTCAGGGCACAGGGTC |
| | | CTGGGCCTCCTATGAGCTGACTCAG |
| | | CCACTCTCAGTGTCAGTGGCCCTGG |
| | | GACAGACGGCCAGGATTACCTGTG |
| | | GGGGAAACAACATTGGAAGTAAAA |
| | | ATGTGCACTGGTACCAGCAGAAGC |
| | | CAGGCCAGGCCCCTATACTGGTCAT |
| | | CTATAGGAATACCAACCGGCCCTCT |
| | | GGGATCCCTGAGCGATTCTCTGGCT |
| | | CCAACTCGGGGAACACGGCCACCC |
| | | TGACCATCAGCAGAGCCCAAGTCG |
| | | GGGATGAGTCTGACTATTTCTGTCA |
| | | GGTGTGGGACAGCAGCACTGTGGT |
| | | ATTCGGCGGAGGGACCAAGCTGAC |
| | | CGTCCTAGGTCAGCCCAAGGCTGC |
| | | ACCCTCGGTCACTCTGTTCCCGCCC |
| | | TCCTCTGAGGAGCTTCAAGCCAACA |
| | | AGGCCACACTGGTGTGTCTCATCAG |
| | | TGACTTCTACCCGGGAGCCGTGACA |
| | | GTGGCCTGGAAGGCAGATAGCAGC |
| | | CCCGTCAAGGCGGGAGTGGAAACC |
| | | ACCACACCCTCCAAACAAAGCAAC |
| | | AACAAGTACGCGGCCAGCAGCTAT |
| | | CTGAGCCTGACGCCTGAGCAGTGG |
| | | AAGTCCCACAGAAGCTACAGCTGC |
| | | CAGGTCACGCATGAAGGGAGCACC |
| | | GTGGAGAAGACAGTGGCCCCTACA |
| | | GAATGTTCATAG |
| 1224 | Hu anti-huCCR8 LIBC321824-1 HuIgG1z | ATGGACATGAGGGTGCCCGCTCAG |
| | mAb_HC | CTCCTGGGGCTCCTGCTGCTGTGGC |
| | | TGAGAGGTGCGCGCTGTCAGGTGC |
| | | AGGTGGTGGAGtctGGGGGAGGCGT |
| | | GGTCCAGccTGGGAGGTCcCTGAGA |
| | | CTCTCCTGTGGAGCCTCTGGATTCA |
| | | CcttCAGtggcTATGGCATgcACTGGGT |
| | | CcgcCAggcTCCAGGCAAGGGGCTGG |
| | | AGTGGGTGGCAGTTATATCATATGA |
| | | TGGAAGTAATAAATACTATGCAGA |
| | | CTCCGTgAAGGGCCGATTCCCCATC |
| | | TCAAGAgaCAATTCCAAGAACACGC |
| | | TGTATCTGCAAATGAACAGcCTGAG |
| | | AGGTGAGGACACGGCGGTGTATTA |
| | | CTGTgcGAGAGTTTATTATGGTTCGG |
| | | GGATTTATTATAAAAACCGCTacTaC |
| | | TACGGTAtgGACGtctGGGGCCAAGG |
| | | GACCACGGTcgcCGTCTCCTCAGCCT |
| | | CCACCAAGGGCCCATCGGTCTTCCC |
| | | CCTGGCACCCTCCTCCAAGAGCACC |
| | | TCTGGGGGCACAGCGGCCCTGGGC |
| | | TGCCTGGTCAAGGACTACTTCCCCG |
| | | AACCGGTGACGGTGTCGTGGAACT |
| | | CAGGCGCCCTGACCAGCGGCGTGC |
| | | ACACCTTCCCGGCTGTCCTACAGTC |
| | | CTCAGGACTCTACTCCCTCAGCAGC |
| | | GTGGTGACCGTGCCCTCCAGCAGCT |
| | | TGGGCACCCAGACCTACATCTGCA |
| | | ACGTGAATCACAAGCCCAGCAACA |
| | | CCAAGGTGGACAAGAAAGTTGAGC |
| | | CCAAATCTTGTGACAAAACTCACAC |
| | | ATGCCCACCGTGCCCAGCACCTGA |
| | | ACTCCTGGGGGGACCGTCAGTCTTC |
| | | CTCTTCCCCCCAAAACCCAAGGACA |
| | | CCCTCATGATCTCCCGGACCCCTGA |
| | | GGTCACATGCGTGGTGGTGGACGT |
| | | GAGCCACGAAGACCCTGAGGTCAA |
| | | GTTCAACTGGTACGTGGACGGCGT |
| | | GGAGGTGCATAATGCCAAGACAAA |
| | | GCCGCGGGAGGAGCAGTACAACAG |
| | | CACGTACCGTGTGGTCAGCGTCCTC |
| | | ACCGTCCTGCACCAGGACTGGCTG |
| | | AATGGCAAGGAGTACAAGTGCAAG |
| | | GTGTCCAACAAAGCCCTCCCAGCCC |
| | | CCATCGAGAAAACCATCTCCAAAG |
| | | CCAAAGGGCAGCCCCGAGAACCAC |
| | | AGGTGTACACCCTGCCCCCATCCCG |
| | | GGAGGAGATGACCAAGAACCAGGT |
| | | CAGCCTGACCTGCCTGGTCAAAGG |
| | | CTTCTATCCCAGCGACATCGCCGTG |
| | | GAGTGGGAGAGCAATGGGCAGCCG |
| | | GAGAACAACTACAAGACCACGCCT |
| | | CCCGTGCTGGACTCCGACGGCTCCT |
| | | TCTTCCTCTATAGCAAGCTCACCGT |
| | | GGACAAGAGCAGGTGGCAGCAGGG |
| | | GAACGTCTTCTCATGCTCCGTGATG |
| | | CATGAGGCTCTGCACAACCACTAC |
| | | ACGCAGAAGAGCCTCTCCCTGTCTC |
| | | CGGGCAAATAG |
| 1225 | Hu anti-huCCR8 LIBC321845-1 HuIgG1z | ATGGCCTGGGCTCTGCTGCTCCTCA |
| | mAb_LC | CCCTCCTCACTCAGGGCACAGGGTC |
| | | CTGGGCCTCCTATGAGCTGACTCAG |
| | | CCACTCTCAGTGTCAGTGGCCCTGG |
| | | GACAGACGGCCAGGATTACCTGTG |
| | | GGGGAAACAACATTGGAAGTAAAA |
| | | ATGTGCACTGGTACCAGCAGAAGC |
| | | CAGGCCAGGCCCCTATACTGGTCAT |
| | | CTATAGGAATACCAACCGGCCCTCT |
| | | GGGATCCCTGAGCGATTCTCTGGCT |
| | | CCAACTCGGGGAACACGGCCACCC |
| | | TGACCATCAGCAGAGCCCAAGTCG |
| | | GGGATGAGTCTGACTATTTCTGTCA |
| | | GGTGTGGGACAGCAGCACTGTGGT |
| | | ATTCGGCGGAGGGACCAAGCTGAC |
| | | CGTCCTAGGTCAGCCCAAGGCTGC |
| | | ACCCTCGGTCACTCTGTTCCCGCCC |
| | | TCCTCTGAGGAGCTTCAAGCCAACA |
| | | AGGCCACACTGGTGTGTCTCATCAG |
| | | TGACTTCTACCCGGGAGCCGTGACA |
| | | GTGGCCTGGAAGGCAGATAGCAGC |
| | | CCCGTCAAGGCGGGAGTGGAAACC |
| | | ACCACACCCTCCAAACAAAGCAAC |
| | | AACAAGTACGCGGCCAGCAGCTAT |
| | | CTGAGCCTGACGCCTGAGCAGTGG |
| | | AAGTCCCACAGAAGCTACAGCTGC |
| | | CAGGTCACGCATGAAGGGAGCACC |
| | | GTGGAGAAGACAGTGGCCCCTACA |
| | | GAATGTTCATAG |
| 1226 | Hu anti-huCCR8 LIBC321845-1 HuIgG1z | ATGGACATGAGGGTGCCCGCTCAG |
| | mAb_HC | CTCCTGGGGCTCCTGCTGCTGTGGC |
| | | TGAGAGGTGCGCGCTGTCAGGTGC |
| | | AGGTGGTGGAGTCTGGGGGAGGCG |
| | | TGGTCCAGCCTGGGAGGTCCCTGA |
| | | GACTCTCCTGTGGAGCCTCTGGATT |
| | | CACCTTCAGTGGCTATGGCATGCAC |
| | | TGGGTCCGCCAGGCTCCAGGCAAG |
| | | GGGCTGGAGTGGGTGGCAGTTATA |
| | | TCATATGATGGAAGTAATAAATACT |
| | | ATGCAGACTCCGTGAAGGGCCGAT |
| | | TCACCATCTCAAGAGACAATTCCAA |
| | | GAACACGCTGTATCTGCAAATGAA |
| | | CAGCCTGAGAGGTGAGGACACGGC |
| | | GGTGTATTACTGTGCGAGAGTTTAT |
| | | TATGGTTCGGGGATTTATTATAAAA |
| | | ACCGCTACTACTACGGTATGGACGT |
| | | CTGGGGCCAAGGGACCACGGTCGC |
| | | CGTCTCCTCAGCCTCCACCAAGGGC |
| | | CCATCGGTCTTCCCCCTGGCACCCT |
| | | CCTCCAAGAGCACCTCTGGGGGCA |
| | | CAGCGGCCCTGGGCTGCCTGGTCA |
| | | AGGACTACTTCCCCGAACCGGTGA |
| | | CGGTGTCGTGGAACTCAGGCGCCCT |
| | | GACCAGCGGCGTGCACACCTTCCC |
| | | GGCTGTCCTACAGTCCTCAGGACTC |
| | | TACTCCCTCAGCAGCGTGGTGACCG |
| | | TGCCCTCCAGCAGCTTGGGCACCCA |
| | | GACCTACATCTGCAACGTGAATCAC |
| | | AAGCCCAGCAACACCAAGGTGGAC |
| | | AAGAAAGTTGAGCCCAAATCTTGT |
| | | GACAAAACTCACACATGCCCACCG |
| | | TGCCCAGCACCTGAACTCCTGGGG |
| | | GGACCGTCAGTCTTCCTCTTCCCCC |
| | | CAAAACCCAAGGACACCCTCATGA |
| | | TCTCCCGGACCCCTGAGGTCACATG |
| | | CGTGGTGGTGGACGTGAGCCACGA |
| | | AGACCCTGAGGTCAAGTTCAACTG |
| | | GTACGTGGACGGCGTGGAGGTGCA |
| | | TAATGCCAAGACAAAGCCGCGGGA |
| | | GGAGCAGTACAACAGCACGTACCG |
| | | TGTGGTCAGCGTCCTCACCGTCCTG |
| | | CACCAGGACTGGCTGAATGGCAAG |
| | | GAGTACAAGTGCAAGGTGTCCAAC |
| | | AAAGCCCTCCCAGCCCCCATCGAG |
| | | AAAACCATCTCCAAAGCCAAAGGG |
| | | CAGCCCCGAGAACCACAGGTGTAC |
| | | ACCCTGCCCCCATCCCGGGAGGAG |
| | | ATGACCAAGAACCAGGTCAGCCTG |
| | | ACCTGCCTGGTCAAAGGCTTCTATC |
| | | CCAGCGACATCGCCGTGGAGTGGG |
| | | AGAGCAATGGGCAGCCGGAGAACA |
| | | ACTACAAGACCACGCCTCCCGTGCT |
| | | GGACTCCGACGGCTCCTTCTTCCTC |
| | | TATAGCAAGCTCACCGTGGACAAG |
| | | AGCAGGTGGCAGCAGGGGAACGTC |
| | | TTCTCATGCTCCGTGATGCATGAGG |
| | | CTCTGCACAACCACTACACGCAGA |
| | | AGAGCCTCTCCCTGTCTCCGGGCAA |
| | | ATAG |
| 1227 | Hu anti-huCCR8 LIBC322176-1 HuIgG1z | ATGGCCTGGGCTCTGCTGCTCCTCA |
| | mAb_LC | CCCTCCTCACTCAGGGCACAGGGTC |
| | | CTGGGCCTCCTATGACCTGACTCAG |
| | | CCACTCTCAGTGTCAGTGGCCCTGG |
| | | GACAGACGGCCAGGATTACCTGTG |
| | | GGGGAAACAACATTGGAGATAAAA |
| | | ATGTGCACTGGTACCAGCAGAAGC |
| | | CAGGCCAGGCCCCTGTGCTGGTCAT |
| | | CTATAGGAATAACGTCCGGCCCTCT |
| | | GGGATCCCTGAGCGATTCTCTGGCT |
| | | CCAACTCGGGGAACACGGCCACCC |
| | | TGACCATCAGCAGAGCCCAAGCCG |
| | | GGGATGAGGCTGACTATTACTGTCA |
| | | GGTGTGGGACAGCAGCACTGTGGT |
| | | TTTCGGCGGAGGGACCAAGCTGAC |
| | | CGTCCTAGGTCAGCCCAAGGCTGC |
| | | ACCCTCGGTCACTCTGTTCCCGCCC |
| | | TCCTCTGAGGAGCTTCAAGCCAACA |
| | | AGGCCACACTGGTGTGTCTCATCAG |
| | | TGACTTCTACCCGGGAGCCGTGACA |
| | | GTGGCCTGGAAGGCAGATAGCAGC |
| | | CCCGTCAAGGCGGGAGTGGAAACC |
| | | ACCACACCCTCCAAACAAAGCAAC |
| | | AACAAGTACGCGGCCAGCAGCTAT |
| | | CTGAGCCTGACGCCTGAGCAGTGG |
| | | AAGTCCCACAGAAGCTACAGCTGC |
| | | CAGGTCACGCATGAAGGGAGCACC |
| | | GTGGAGAAGACAGTGGCCCCTACA |
| | | GAATGTTCATAG |
| 1228 | Hu anti-huCCR8 LIBC322176-1 HuIgG1z | ATGGACATGAGGGTGCCCGCTCAG |
| | mAb_HC | CTCCTGGGGCTCCTGCTGCTGTGGC |
| | | TGAGAGGTGCGCGCTGTCAGGTGC |
| | | AGCTGGTGGAATCTGGGGGAGGCG |
| | | TGGTCCAGCCTGGGAGGTCCCTGA |
| | | GACTCTCCTGTGCAGCCTCTGGGCT |
| | | CAACTTCAGTAACTTTGGCATGCAC |
| | | TGGGTCCGCCAGGCTCCAGGCAAG |
| | | GGGCTGGACTGGGTGGCAGTTATA |
| | | TCATATGATGGAGGTAATAAATACT |
| | | ATGCAGACTCCGTGAAGGGCCGAT |
| | | TCACCGTCTCCAGAGACAATTCCAA |
| | | GAACACGCTCTTTCTGCAAATGAAC |
| | | AGCCTGAGAGCTGAGGACACGGCT |
| | | CTGTATTACTGTGCGAAAGTTTACT |
| | | ATGGCTCGGGCAGTTATTATAAAA |
| | | AGAGGTACTACTACGGTATGGACG |
| | | TCTGGGGCCAGGGGACCACGGTCA |
| | | CCGTCTCCTCAGCCTCCACCAAGGG |
| | | CCCATCGGTCTTCCCCCTGGCACCC |
| | | TCCTCCAAGAGCACCTCTGGGGGC |
| | | ACAGCGGCCCTGGGCTGCCTGGTC |
| | | AAGGACTACTTCCCCGAACCGGTG |
| | | ACGGTGTCGTGGAACTCAGGCGCC |
| | | CTGACCAGCGGCGTGCACACCTTCC |
| | | CGGCTGTCCTACAGTCCTCAGGACT |
| | | CTACTCCCTCAGCAGCGTGGTGACC |
| | | GTGCCCTCCAGCAGCTTGGGCACCC |
| | | AGACCTACATCTGCAACGTGAATC |
| | | ACAAGCCCAGCAACACCAAGGTGG |
| | | ACAAGAAAGTTGAGCCCAAATCTT |
| | | GTGACAAAACTCACACATGCCCAC |
| | | CGTGCCCAGCACCTGAACTCCTGGG |
| | | GGGACCGTCAGTCTTCCTCTTCCCC |
| | | CCAAAACCCAAGGACACCCTCATG |
| | | ATCTCCCGGACCCCTGAGGTCACAT |
| | | GCGTGGTGGTGGACGTGAGCCACG |
| | | AAGACCCTGAGGTCAAGTTCAACT |
| | | GGTACGTGGACGGCGTGGAGGTGC |
| | | ATAATGCCAAGACAAAGCCGCGGG |
| | | AGGAGCAGTACAACAGCACGTACC |
| | | GTGTGGTCAGCGTCCTCACCGTCCT |
| | | GCACCAGGACTGGCTGAATGGCAA |
| | | GGAGTACAAGTGCAAGGTGTCCAA |
| | | CAAAGCCCTCCCAGCCCCCATCGA |
| | | GAAAACCATCTCCAAAGCCAAAGG |
| | | GCAGCCCCGAGAACCACAGGTGTA |
| | | CACCCTGCCCCCATCCCGGGAGGA |
| | | GATGACCAAGAACCAGGTCAGCCT |
| | | GACCTGCCTGGTCAAAGGCTTCTAT |
| | | CCCAGCGACATCGCCGTGGAGTGG |
| | | GAGAGCAATGGGCAGCCGGAGAAC |
| | | AACTACAAGACCACGCCTCCCGTG |
| | | CTGGACTCCGACGGCTCCTTCTTCC |
| | | TCTATAGCAAGCTCACCGTGGACA |
| | | AGAGCAGGTGGCAGCAGGGGAACG |
| | | TCTTCTCATGCTCCGTGATGCATGA |
| | | GGCTCTGCACAACCACTACACGCA |
| | | GAAGAGCCTCTCCCTGTCTCCGGGC |
| | | AAATAG |
| 1229 | Hu anti-huCCR8 LIBC323412-1 HuIgG1z | ATGGCCTGGGCTCTGCTGCTCCTCA |
| | mAb_LC | CCCTCCTCACTCAGGGCACAGGGTC |
| | | CTGGGCCTCCTATGAGCTGACTCAG |
| | | CCACTCTCAGTGTCAGTGGCCCTGG |
| | | GACAGACGGCCAGGATTACCTGTG |
| | | GGGGAAACAACATTGGAAGTAAAA |
| | | ATGTGCACTGGTACCAGCAGAAGC |
| | | CAGGCCAGGCCCCTGTGCTGGTCAT |
| | | CTATAGGGATAGCAACCGGCCCTCT |
| | | GGGATCCCTGAGCGATTCTCTGGCT |
| | | CCAAGTCGGGGAACACGGCCACCC |
| | | TGACCATCAGCAGAGCCCAAGCCG |
| | | GGGATGAGGCTGACTATTACTGTCA |
| | | GGTGTGGGACAGCAGCACTGTGGT |
| | | TTTCGGCGGAGGGGCCAAGCTGAC |
| | | CGTCCTAGGTCAGCCCAAGGCTGC |
| | | ACCCTCGGTCACTCTGTTCCCGCCC |
| | | TCCTCTGAGGAGCTTCAAGCCAACA |
| | | AGGCCACACTGGTGTGTCTCATCAG |
| | | TGACTTCTACCCGGGAGCCGTGACA |
| | | GTGGCCTGGAAGGCAGATAGCAGC |
| | | CCCGTCAAGGCGGGAGTGGAAACC |
| | | ACCACACCCTCCAAACAAAGCAAC |
| | | AACAAGTACGCGGCCAGCAGCTAT |
| | | CTGAGCCTGACGCCTGAGCAGTGG |
| | | AAGTCCCACAGAAGCTACAGCTGC |
| | | CAGGTCACGCATGAAGGGAGCACC |
| | | GTGGAGAAGACAGTGGCCCCTACA |
| | | GAATGTTCATAG |
| 1230 | Hu anti-huCCR8 LIBC323412-1 HuIgG1z | ATGGACATGAGGGTGCCCGCTCAG |
| | mAb_HC | CTCCTGGGGCTCCTGCTGCTGTGGC |
| | | TGAGAGGTGCGCGCTGTCAGGTGC |
| | | AGCTGGTGGAGTCTGGGGGAGGCG |
| | | TGGTCCAGCCTGGGAGGTCCCTGA |
| | | GACTCTCCTGTGCAGCCTCTGGATT |
| | | CAACTTCAGTAGCTGTGGCATGCAC |
| | | TGGGTCCGCCAGGCTCCAGGCAAG |
| | | GGGCTGGAGTGGGTGGCAGTTATA |
| | | TCATATGATGGAACTAATAAATACT |
| | | ATGCGGACTCCGTGAAGGGCCGAT |
| | | TCACCATCTCCAGAGACAATTCCAA |
| | | GAACACGCTGTATCTGCAAATGAA |
| | | CAGCCTGAGAGCTGAGGACACGGC |
| | | TGTGTATTACTGTGCGAAAGTTTAC |
| | | TATGGTTCGGGTATTTATTATAAAA |
| | | AGAACTACTACTACGGTATGGACG |
| | | TCTGGGGCCAAGGGACCACGGTCA |
| | | CCGTCTCCTCAGCCTCCACCAAGGG |
| | | CCCATCGGTCTTCCCCCTGGCACCC |
| | | TCCTCCAAGAGCACCTCTGGGGGC |
| | | ACAGCGGCCCTGGGCTGCCTGGTC |
| | | AAGGACTACTTCCCCGAACCGGTG |
| | | ACGGTGTCGTGGAACTCAGGCGCC |
| | | CTGACCAGCGGCGTGCACACCTTCC |
| | | CGGCTGTCCTACAGTCCTCAGGACT |
| | | CTACTCCCTCAGCAGCGTGGTGACC |
| | | GTGCCCTCCAGCAGCTTGGGCACCC |
| | | AGACCTACATCTGCAACGTGAATC |
| | | ACAAGCCCAGCAACACCAAGGTGG |
| | | ACAAGAAAGTTGAGCCCAAATCTT |
| | | GTGACAAAACTCACACATGCCCAC |
| | | CGTGCCCAGCACCTGAACTCCTGGG |
| | | GGGACCGTCAGTCTTCCTCTTCCCC |
| | | CCAAAACCCAAGGACACCCTCATG |
| | | ATCTCCCGGACCCCTGAGGTCACAT |
| | | GCGTGGTGGTGGACGTGAGCCACG |
| | | AAGACCCTGAGGTCAAGTTCAACT |
| | | GGTACGTGGACGGCGTGGAGGTGC |
| | | ATAATGCCAAGACAAAGCCGCGGG |
| | | AGGAGCAGTACAACAGCACGTACC |
| | | GTGTGGTCAGCGTCCTCACCGTCCT |
| | | GCACCAGGACTGGCTGAATGGCAA |
| | | GGAGTACAAGTGCAAGGTGTCCAA |
| | | CAAAGCCCTCCCAGCCCCCATCGA |
| | | GAAAACCATCTCCAAAGCCAAAGG |
| | | GCAGCCCCGAGAACCACAGGTGTA |
| | | CACCCTGCCCCCATCCCGGGAGGA |
| | | GATGACCAAGAACCAGGTCAGCCT |
| | | GACCTGCCTGGTCAAAGGCTTCTAT |
| | | CCCAGCGACATCGCCGTGGAGTGG |
| | | GAGAGCAATGGGCAGCCGGAGAAC |
| | | AACTACAAGACCACGCCTCCCGTG |
| | | CTGGACTCCGACGGCTCCTTCTTCC |
| | | TCTATAGCAAGCTCACCGTGGACA |
| | | AGAGCAGGTGGCAGCAGGGGAACG |
| | | TCTTCTCATGCTCCGTGATGCATGA |
| | | GGCTCTGCACAACCACTACACGCA |
| | | GAAGAGCCTCTCCCTGTCTCCGGGC |
| | | AAATAG |
| 1231 | huCCR8_32360_huIgG1z mAb_HC | ATGGACATGAGGGTGCCCGCTCAG |
| | | CTCCTGGGGCTCCTGCTGCTGTGGC |
| | | TGAGAGGTGCGCGCTGTGAGGTGC |
| | | AGCTGGTGGAGTCTGGGGGAGGCT |
| | | TGGTAAAGCCTGGGGGGTCCCTGA |
| | | GACTCTCCTGTGCAGCCTCTGGATT |
| | | TACTTTCAGTAACGCCCGGATGGGC |
| | | TGGGTCCGCCAGGCTCCAGGGAAG |
| | | GGGCTGGAGTGGGTTGGCCGTATT |
| | | AAAAGCAAAACTGAAGGTGGGACA |
| | | AGAGACTACGCTGCACCCGTGAAA |
| | | GGCAGATTCACCATCTCAAGAGAT |
| | | GATTCAAAAAACACGCTGTATCTGC |
| | | AAATGAACAGCCTGAAAACCGAGG |
| | | ACACAGCCGTGTATTATTGTACCTC |
| | | GTATAGTGGGGTCTGGGGCCAAGG |
| | | GACAATGGTCACCGTCTCTTCAGCC |
| | | TCCACCAAGGGCCCATCGGTCTTCC |
| | | CCCTGGCACCCTCCTCCAAGAGCAC |
| | | CTCTGGGGGCACAGCGGCCCTGGG |
| | | CTGCCTGGTCAAGGACTACTTCCCC |
| | | GAACCGGTGACGGTGTCGTGGAAC |
| | | TCAGGCGCCCTGACCAGCGGCGTG |
| | | CACACCTTCCCGGCTGTCCTACAGT |
| | | CCTCAGGACTCTACTCCCTCAGCAG |
| | | CGTGGTGACCGTGCCCTCCAGCAGC |
| | | TTGGGCACCCAGACCTACATCTGCA |
| | | ACGTGAATCACAAGCCCAGCAACA |
| | | CCAAGGTGGACAAGAAAGTTGAGC |
| | | CCAAATCTTGTGACAAAACTCACAC |
| | | ATGCCCACCGTGCCCAGCACCTGA |
| | | ACTCCTGGGGGGACCGTCAGTCTTC |
| | | CTCTTCCCCCCAAAACCCAAGGACA |
| | | CCCTCATGATCTCCCGGACCCCTGA |
| | | GGTCACATGCGTGGTGGTGGACGT |
| | | GAGCCACGAAGACCCTGAGGTCAA |
| | | GTTCAACTGGTACGTGGACGGCGT |
| | | GGAGGTGCATAATGCCAAGACAAA |
| | | GCCGCGGGAGGAGCAGTACAACAG |
| | | CACGTACCGTGTGGTCAGCGTCCTC |
| | | ACCGTCCTGCACCAGGACTGGCTG |
| | | AATGGCAAGGAGTACAAGTGCAAG |
| | | GTGTCCAACAAAGCCCTCCCAGCCC |
| | | CCATCGAGAAAACCATCTCCAAAG |
| | | CCAAAGGGCAGCCCCGAGAACCAC |
| | | AGGTGTACACCCTGCCCCCATCCCG |
| | | GGAGGAGATGACCAAGAACCAGGT |
| | | CAGCCTGACCTGCCTGGTCAAAGG |
| | | CTTCTATCCCAGCGACATCGCCGTG |
| | | GAGTGGGAGAGCAATGGGCAGCCG |
| | | GAGAACAACTACAAGACCACGCCT |
| | | CCCGTGCTGGACTCCGACGGCTCCT |
| | | TCTTCCTCTATAGCAAGCTCACCGT |
| | | GGACAAGAGCAGGTGGCAGCAGGG |
| | | GAACGTCTTCTCATGCTCCGTGATG |
| | | CATGAGGCTCTGCACAACCACTAC |
| | | ACGCAGAAGAGCCTCTCCCTGTCTC |
| | | CGGGCAAATAG |
| 1232 | huCCR8_32360_huIgG1z mAb_LC | ATGGACATGAGGGTGCCCGCTCAG |
| | | CTCCTGGGGCTCCTGCTGCTGTGGC |
| | | TGAGAGGTGCGCGCTGTGACATCG |
| | | TGATGACCCAGTCTCCAGACTCCCT |
| | | GGCTGTGTCTCTGGGCGAGAGGGC |
| | | CACCATCAACTGCAAGTCCAGCCA |
| | | GAGTGTTTTATACAGTTCCAACAAT |
| | | AAGAACTACTTAGCTTGGTACCATC |
| | | AGAAACCAGGACAGTCTCCTAAGC |
| | | TGCTCATTTCCTGGGCATCTACCCG |
| | | GGAATCCGGGGTCCCTGACCGATTC |
| | | AGTGGCAGCGGGTCTGGGACAGAT |
| | | TTCACTCTCACCATCAACAGCCTGC |
| | | AGGCTGAAGATGTGGCAGTTTATTA |
| | | CTGTCAACAATATTATAGTATTCCG |
| | | ATCACTTTCGGCGGAGGGACCAAG |
| | | GTGGAGATCAAACGAACGGTGGCT |
| | | GCACCATCTGTCTTCATCTTCCCGC |
| | | CATCTGATGAGCAGTTGAAATCTGG |
| | | AACTGCCTCTGTTGTGTGCCTGCTG |
| | | AATAACTTCTATCCCAGAGAGGCC |
| | | AAAGTACAGTGGAAGGTGGATAAC |
| | | GCCCTCCAATCGGGTAACTCCCAGG |
| | | AGAGTGTCACAGAGCAGGACAGCA |
| | | AGGACAGCACCTACAGCCTCAGCA |
| | | GCACCCTGACGCTGAGCAAAGCAG |
| | | ACTACGAGAAACACAAAGTCTACG |
| | | CCTGCGAAGTCACCCATCAGGGCCT |
| | | GAGCTCGCCCGTCACAAAGAGCTT |
| | | CAACAGGGGAGAGTGTTAG |
| 1233 | HCDR1 Consensus | X₁X₂GX₄H |
| | | X₁ = N, S, D, G, T, or R, X₂ = C, N, Y, S, |
| | | or F, X₄ = M or F |
| 1234 | LCDR2 Consensus | RX₂X₃X₄RPS |
| | | X₂ = A, N, D, S, or Q, X₃ = S, T, N, I, F, |
| | | or A, and X₄ = N or V |
| 1235 | LCDR1 consensus | KSSQSVLYSSNNX₁NYLA; X₁ is K or R |
| 1236 | LCVR consensus | DIVMTQSPDSLAVSLGERATINCKSS |
| | | QSVLYSSNNX₁NYLA |
| | | WYX₂QKPGQX₃PKLLISWASTRESGV |
| | | PDRFSGSGSGTDFTLTINSLQAEDVA |
| | | VYYCQQYYSIPITFGGGTKVEIKR, |
| | | wherein X₁ is K or R, X₂ is H or Q, and/or |
| | | X₃ is S or P |
| 1237 | huCCR8_32360_huIgG1z | EVQLVESGGGLVKPGGSLRLSCAAS |
| | mAb(LC:K38R)_HC_no Cterm K | GFTFSNARMGWVRQAPGKGLEWVG |
| | | RIKSKTEGGTRDYAAPVKGRFTISRD |
| | | DSKNTLYLQMNSLKTEDTAVYYCTS |
| | | YSGVWGQGTMVTVSSASTKGPSVFP |
| | | LAPSSKSTSGGTAALGCLVKDYFPEP |
| | | VTVSWNSGALTSGVHTFPAVLQSSG |
| | | LYSLSSVVTVPSSSLGTQTYICNVNH |
| | | KPSNTKVDKKVEPKSCDKTHTCPPCP |
| | | APELLGGPSVFLFPPKPKDTLMISRTP |
| | | EVTCVVVDVSHEDPEVKFNWYVDG |
| | | VEVHNAKTKPREEQYNSTYRVVSVL |
| | | TVLHQDWLNGKEYKCKVSNKALPA |
| | | PIEKTISKAKGQPREPQVYTLPPSREE |
| | | MTKNQVSLTCLVKGFYPSDIAVEWE |
| | | SNGQPENNYKTTPPVLDSDGSFFLYS |
| | | KLTVDKSRWQQGNVFSCSVMHEAL |
| | | HNHYTQKSLSLSPG |
| 1238 | anti- | QVQLVESGGGVVQPGRSLRLSCAAS |
| | huCCR8_44379(VH:D72S, VL:N67A_S68A_ | GFTFSNYGFHWVRQTPGKGLEWVA |
| | M99G_W109F_S111A)_huIgG1z | VISYDGSNRYYASSVKGRFTISRDNS |
| | (mAb)_HC_no Cterm K | KNTLYLQMNSLRGEDTALYYCARV |
| | | YYGSGTYYKNRYYYGMDVWGQGT |
| | | TVTVSSASTKGPSVFPLAPSSKSTSGG |
| | | TAALGCLVKDYFPEPVTVSWNSGAL |
| | | TSGVHTFPAVLQSSGLYSLSSVVTVP |
| | | SSSLGTQTYICNVNHKPSNTKVDKKV |
| | | EPKSCDKTHTCPPCPAPELLGGPSVFL |
| | | FPPKPKDTLMISRTPEVTCVVVDVSH |
| | | EDPEVKFNWYVDGVEVHNAKTKPR |
| | | EEQYNSTYRVVSVLTVLHQDWLNG |
| | | KEYKCKVSNKALPAPIEKTISKAKGQ |
| | | PREPQVYTLPPSREEMTKNQVSLTCL |
| | | VKGFYPSDIAVEWESNGQPENNYKT |
| | | TPPVLDSDGSFFLYSKLTVDKSRWQQ |
| | | GNVFSCSVMHEALHNHYTQKSLSLS |
| | | PG |
| 1239 | anti- | QVQLVESGGGVVQPGRSLRLSCAAS |
| | huCCR8_44379(VH:D61A_D72A, VL:N67Q_ | GFTFSNYGFHWVRQTPGKGLEWVA |
| | M99E_W109F_S111A)_huIgG1z | VISYAGSNRYYAASVKGRFTISRDNS |
| | (mAb)_HC_no Cterm K | KNTLYLQMNSLRGEDTALYYCARV |
| | | YYGSGTYYKNRYYYGMDVWGQGT |
| | | TVTVSSASTKGPSVFPLAPSSKSTSGG |
| | | TAALGCLVKDYFPEPVTVSWNSGAL |
| | | TSGVHTFPAVLQSSGLYSLSSVVTVP |
| | | SSSLGTQTYICNVNHKPSNTKVDKKV |
| | | EPKSCDKTHTCPPCPAPELLGGPSVFL |
| | | FPPKPKDTLMISRTPEVTCVVVDVSH |
| | | EDPEVKFNWYVDGVEVHNAKTKPR |
| | | EEQYNSTYRVVSVLTVLHQDWLNG |
| | | KEYKCKVSNKALPAPIEKTISKAKGQ |
| | | PREPQVYTLPPSREEMTKNQVSLTCL |
| | | VKGFYPSDIAVEWESNGQPENNYKT |
| | | TPPVLDSDGSFFLYSKLTVDKSRWQQ |
| | | GNVFSCSVMHEALHNHYTQKSLSLS |
| | | PG |
| 1240 | anti- | QVQLVESGGGVVQPGRSLRLSCAAS |
| | huCCR8_44379(VH:D61S, VL:N67Q_M99G_ | GFTFSNYGFHWVRQTPGKGLEWVA |
| | W109F_S111A)_huIgG1z (mAb)_HC_no | VISYSGSNRYYADSVKGRFTISRDNS |
| | Cterm K | KNTLYLQMNSLRGEDTALYYCARV |
| | | YYGSGTYYKNRYYYGMDVWGQGT |
| | | TVTVSSASTKGPSVFPLAPSSKSTSGG |
| | | TAALGCLVKDYFPEPVTVSWNSGAL |
| | | TSGVHTFPAVLQSSGLYSLSSVVTVP |
| | | SSSLGTQTYICNVNHKPSNTKVDKKV |
| | | EPKSCDKTHTCPPCPAPELLGGPSVFL |
| | | FPPKPKDTLMISRTPEVTCVVVDVSH |
| | | EDPEVKFNWYVDGVEVHNAKTKPR |
| | | EEQYNSTYRVVSVLTVLHQDWLNG |
| | | KEYKCKVSNKALPAPIEKTISKAKGQ |
| | | PREPQVYTLPPSREEMTKNQVSLTCL |
| | | VKGFYPSDIAVEWESNGQPENNYKT |
| | | TPPVLDSDGSFFLYSKLTVDKSRWQQ |
| | | GNVFSCSVMHEALHNHYTQKSLSLS |
| | | PG |
| 1241 | Hu anti-huCCR8 LIBC315615-1 HuIgG1z | QVQLVESGGGVAQPGRSLRLSCAAS |
| | mAb_HC_no Cterm K | GFNFSNCGMHWVRQAPGKGLEWVA |
| | | VISYDGGNKYHADSVKGRFTISRDDS |
| | | KNTLYLQMDSLRTEDTAVYYCAKV |
| | | YYGSGIYYKNRYYYGMDVWGQGTT |
| | | VTVSSASTKGPSVFPLAPSSKSTSGGT |
| | | AALGCLVKDYFPEPVTVSWNSGALT |
| | | SGVHTFPAVLQSSGLYSLSSVVTVPS |
| | | SSLGTQTYICNVNHKPSNTKVDKKV |
| | | EPKSCDKTHTCPPCPAPELLGGPSVFL |
| | | FPPKPKDTLMISRTPEVTCVVVDVSH |
| | | EDPEVKFNWYVDGVEVHNAKTKPR |
| | | EEQYNSTYRVVSVLTVLHQDWLNG |
| | | KEYKCKVSNKALPAPIEKTISKAKGQ |
| | | PREPQVYTLPPSREEMTKNQVSLTCL |
| | | VKGFYPSDIAVEWESNGQPENNYKT |
| | | TPPVLDSDGSFFLYSKLTVDKSRWQQ |
| | | GNVFSCSVMHEALHNHYTQKSLSLS |
| | | PG |
| 1242 | Hu anti-huCCR8 LIBC317152-1 HuIgG1z | QVQLVESGGGVAQPGRSLRLSCAAS |
| | mAb_HC_no Cterm K | GFNFSNCGMHWVRQAPGKGLEWVA |
| | | VISYDGGNKYYADSVKGRFTISRDDS |
| | | KNTLYLQMDSLRTEDTAVYYCAKV |
| | | YYGSGIYYKNRYYYGMDVWGQGTT |
| | | VTVSSASTKGPSVFPLAPSSKSTSGGT |
| | | AALGCLVKDYFPEPVTVSWNSGALT |
| | | SGVHTFPAVLQSSGLYSLSSVVTVPS |
| | | SSLGTQTYICNVNHKPSNTKVDKKV |
| | | EPKSCDKTHTCPPCPAPELLGGPSVFL |
| | | FPPKPKDTLMISRTPEVTCVVVDVSH |
| | | EDPEVKFNWYVDGVEVHNAKTKPR |
| | | EEQYNSTYRVVSVLTVLHQDWLNG |
| | | KEYKCKVSNKALPAPIEKTISKAKGQ |
| | | PREPQVYTLPPSREEMTKNQVSLTCL |
| | | VKGFYPSDIAVEWESNGQPENNYKT |
| | | TPPVLDSDGSFFLYSKLTVDKSRWQQ |
| | | GNVFSCSVMHEALHNHYTQKSLSLS |
| | | PG |
| 1243 | Hu anti-huCCR8 LIBC317471-1 HuIgG1z | QVQLVESGGGVVQPGRSLRLSCVVS |
| | mAb_HC_no Cterm K | GFNFSNNGMHWVRQAPGKGLEWVA |
| | | VISNDGSNKYYADSVRGRFTISRDNS |
| | | KNTLYLQMNSLRAEDTAVYSCAKV |
| | | YYGSGIYYKNNYYYGMDVWGQGTT |
| | | VTVSSASTKGPSVFPLAPSSKSTSGGT |
| | | AALGCLVKDYFPEPVTVSWNSGALT |
| | | SGVHTFPAVLQSSGLYSLSSVVTVPS |
| | | SSLGTQTYICNVNHKPSNTKVDKKV |
| | | EPKSCDKTHTCPPCPAPELLGGPSVFL |
| | | FPPKPKDTLMISRTPEVTCVVVDVSH |
| | | EDPEVKFNWYVDGVEVHNAKTKPR |
| | | EEQYNSTYRVVSVLTVLHQDWLNG |
| | | KEYKCKVSNKALPAPIEKTISKAKGQ |
| | | PREPQVYTLPPSREEMTKNQVSLTCL |
| | | VKGFYPSDIAVEWESNGQPENNYKT |
| | | TPPVLDSDGSFFLYSKLTVDKSRWQQ |
| | | GNVFSCSVMHEALHNHYTQKSLSLS |
| | | PG |
| 1244 | Hu anti-huCCR8 LIBC317977-1 HuIgG1z | QVQLVESGGGVVQPGRSLRLSCAAS |
| | mAb_HC_no Cterm K | GFNFNTYGMHWVRQAPGKGLEWVA |
| | | VISYDGSNKYYADSVKGRFTISRDNS |
| | | KSTLYLQMNSLRAEDTAVYYCARVY |
| | | YGSGSYYKKNYYYGMDVWGQGTT |
| | | VTVSSASTKGPSVFPLAPSSKSTSGGT |
| | | AALGCLVKDYFPEPVTVSWNSGALT |
| | | SGVHTFPAVLQSSGLYSLSSVVTVPS |
| | | SSLGTQTYICNVNHKPSNTKVDKKV |
| | | EPKSCDKTHTCPPCPAPELLGGPSVFL |
| | | FPPKPKDTLMISRTPEVTCVVVDVSH |
| | | EDPEVKFNWYVDGVEVHNAKTKPR |
| | | EEQYNSTYRVVSVLTVLHQDWLNG |
| | | KEYKCKVSNKALPAPIEKTISKAKGQ |
| | | PREPQVYTLPPSREEMTKNQVSLTCL |
| | | VKGFYPSDIAVEWESNGQPENNYKT |
| | | TPPVLDSDGSFFLYSKLTVDKSRWQQ |
| | | GNVFSCSVMHEALHNHYTQKSLSLS |
| | | PG |
| 1245 | Hu anti-huCCR8 LIBC318774-1 HuIgG1z | QVQVVESGGGVVQPGRSLRLSCAAS |
| | mAb_HC_no Cterm K | GFTLSSYGFHWVRQTPGKGLEWVAV |
| | | ISYDGSNKYYADSVKGRFTISRDNSK |
| | | NTLYLQMNSLRGEDTAVYYCARVY |
| | | YGSGTYYKNRYYYGMDVWGQGTT |
| | | VTVSSASTKGPSVFPLAPSSKSTSGGT |
| | | AALGCLVKDYFPEPVTVSWNSGALT |
| | | SGVHTFPAVLQSSGLYSLSSVVTVPS |
| | | SSLGTQTYICNVNHKPSNTKVDKKV |
| | | EPKSCDKTHTCPPCPAPELLGGPSVFL |
| | | FPPKPKDTLMISRTPEVTCVVVDVSH |
| | | EDPEVKFNWYVDGVEVHNAKTKPR |
| | | EEQYNSTYRVVSVLTVLHQDWLNG |
| | | KEYKCKVSNKALPAPIEKTISKAKGQ |
| | | PREPQVYTLPPSREEMTKNQVSLTCL |
| | | VKGFYPSDIAVEWESNGQPENNYKT |
| | | TPPVLDSDGSFFLYSKLTVDKSRWQQ |
| | | GNVFSCSVMHEALHNHYTQKSLSLS |
| | | PG |
| 1246 | Hu anti-huCCR8 LIBC319840-1 HuIgG1z | QVQLVESGGGVVQPGRSLRLSCVVS |
| | mAb_HC_no Cterm K | GFNFINNGMHWVRQAPGKGLDWVA |
| | | VISNDGSNKYYPDSVKGRFTISRDNS |
| | | KNTLYLQMNSLRAEDSAVYYCAKV |
| | | YYGSGNYYKNNYYYGMDVWGQGT |
| | | TVTVSSASTKGPSVFPLAPSSKSTSGG |
| | | TAALGCLVKDYFPEPVTVSWNSGAL |
| | | TSGVHTFPAVLQSSGLYSLSSVVTVP |
| | | SSSLGTQTYICNVNHKPSNTKVDKKV |
| | | EPKSCDKTHTCPPCPAPELLGGPSVFL |
| | | FPPKPKDTLMISRTPEVTCVVVDVSH |
| | | EDPEVKFNWYVDGVEVHNAKTKPR |
| | | EEQYNSTYRVVSVLTVLHQDWLNG |
| | | KEYKCKVSNKALPAPIEKTISKAKGQ |
| | | PREPQVYTLPPSREEMTKNQVSLTCL |
| | | VKGFYPSDIAVEWESNGQPENNYKT |
| | | TPPVLDSDGSFFLYSKLTVDKSRWQQ |
| | | GNVFSCSVMHEALHNHYTQKSLSLS |
| | | PG |
| 1247 | Hu anti-huCCR8 LIBC320212-1 HuIgG1z | QMQVVESGGGVVQPGRSLRLSCAAS |
| | mAb_HC_no Cterm K | GFTFSSSGMHWVRQAPGKGLEWVA |
| | | VISHDGSNKYYADSVKGRFTISRDNS |
| | | KNTLYLQMNSLGGEDTAVYYCAKV |
| | | YYGSGIYYKNRYYYGMDVWGQGTT |
| | | VIVSSASTKGPSVFPLAPSSKSTSGGT |
| | | AALGCLVKDYFPEPVTVSWNSGALT |
| | | SGVHTFPAVLQSSGLYSLSSVVTVPS |
| | | SSLGTQTYICNVNHKPSNTKVDKKV |
| | | EPKSCDKTHTCPPCPAPELLGGPSVFL |
| | | FPPKPKDTLMISRTPEVTCVVVDVSH |
| | | EDPEVKFNWYVDGVEVHNAKTKPR |
| | | EEQYNSTYRVVSVLTVLHQDWLNG |
| | | KEYKCKVSNKALPAPIEKTISKAKGQ |
| | | PREPQVYTLPPSREEMTKNQVSLTCL |
| | | VKGFYPSDIAVEWESNGQPENNYKT |
| | | TPPVLDSDGSFFLYSKLTVDKSRWQQ |
| | | GNVFSCSVMHEALHNHYTQKSLSLS |
| | | PG |
| 1248 | Hu anti-huCCR8 LIBC320384-1 HuIgG1z | QVQLVESGGGVAQPGRSLRLSCAAS |
| | mAb_HC_no Cterm K | GFNFSDCGMHWVRQAPGKGLEWVA |
| | | VISYDGGNKYYADSVKGRFTISRDDS |
| | | KNTLYLQTDSLRTEDTAVYYCAKVY |
| | | YGSGIYYKNRYYYGMDVWGQGTTV |
| | | TVSSASTKGPSVFPLAPSSKSTSGGTA |
| | | ALGCLVKDYFPEPVTVSWNSGALTS |
| | | GVHTFPAVLQSSGLYSLSSVVTVPSS |
| | | SLGTQTYICNVNHKPSNTKVDKKVE |
| | | PKSCDKTHTCPPCPAPELLGGPSVFLF |
| | | PPKPKDTLMISRTPEVTCVVVDVSHE |
| | | DPEVKFNWYVDGVEVHNAKTKPRE |
| | | EQYNSTYRVVSVLTVLHQDWLNGK |
| | | EYKCKVSNKALPAPIEKTISKAKGQP |
| | | REPQVYTLPPSREEMTKNQVSLTCLV |
| | | KGFYPSDIAVEWESNGQPENNYKTTP |
| | | PVLDSDGSFFLYSKLTVDKSRWQQG |
| | | NVFSCSVMHEALHNHYTQKSLSLSP |
| | | G |
| 1249 | Hu anti-huCCR8 LIBC320689-1 HuIgG1z | QVQVVESGGGVVQPGRSLRLSCAAS |
| | mAb_HC_no Cterm K | GFTFSSYGMHWVRQAPGKGLEWVA |
| | | VISFDGNNKYYADSVKGRFTISRDNS |
| | | KNTLYLQMNSLRGEDTAVYYCARV |
| | | YYGSGSYYKNRYYYGMDVWGQGT |
| | | TVTVSTASTKGPSVFPLAPSSKSTSGG |
| | | TAALGCLVKDYFPEPVTVSWNSGAL |
| | | TSGVHTFPAVLQSSGLYSLSSVVTVP |
| | | SSSLGTQTYICNVNHKPSNTKVDKKV |
| | | EPKSCDKTHTCPPCPAPELLGGPSVFL |
| | | FPPKPKDTLMISRTPEVTCVVVDVSH |
| | | EDPEVKFNWYVDGVEVHNAKTKPR |
| | | EEQYNSTYRVVSVLTVLHQDWLNG |
| | | KEYKCKVSNKALPAPIEKTISKAKGQ |
| | | PREPQVYTLPPSREEMTKNQVSLTCL |
| | | VKGFYPSDIAVEWESNGQPENNYKT |
| | | TPPVLDSDGSFFLYSKLTVDKSRWQQ |
| | | GNVFSCSVMHEALHNHYTQKSLSLS |
| | | PG |
| 1250 | Hu anti-huCCR8 LIBC321408-1 HuIgG1z | QVQLVESGGGVVQPGRSLRLSCAVS |
| | mAb_HC_no Cterm K | GFTFSSNGMHWVRQAPGKGLEWVA |
| | | VISNDGSNKYYGDSVKGRFTISRDNS |
| | | KNTLYLQMNSLRAEDTAVYYCAKV |
| | | YYGSGIYYRNNYYYGMDVWGQGTT |
| | | VTVSSASTKGPSVFPLAPSSKSTSGGT |
| | | AALGCLVKDYFPEPVTVSWNSGALT |
| | | SGVHTFPAVLQSSGLYSLSSVVTVPS |
| | | SSLGTQTYICNVNHKPSNTKVDKKV |
| | | EPKSCDKTHTCPPCPAPELLGGPSVFL |
| | | FPPKPKDTLMISRTPEVTCVVVDVSH |
| | | EDPEVKFNWYVDGVEVHNAKTKPR |
| | | EEQYNSTYRVVSVLTVLHQDWLNG |
| | | KEYKCKVSNKALPAPIEKTISKAKGQ |
| | | PREPQVYTLPPSREEMTKNQVSLTCL |
| | | VKGFYPSDIAVEWESNGQPENNYKT |
| | | TPPVLDSDGSFFLYSKLTVDKSRWQQ |
| | | GNVFSCSVMHEALHNHYTQKSLSLS |
| | | PG |
| 1251 | Hu anti-huCCR8 LIBC321824-1 HuIgG1z | QVQVVESGGGVVQPGRSLRLSCGAS |
| | mAb_HC_no Cterm K | GFTFSGYGMHWVRQAPGKGLEWVA |
| | | VISYDGSNKYYADSVKGRFPISRDNS |
| | | KNTLYLQMNSLRGEDTAVYYCARV |
| | | YYGSGIYYKNRYYYGMDVWGQGTT |
| | | VAVSSASTKGPSVFPLAPSSKSTSGGT |
| | | AALGCLVKDYFPEPVTVSWNSGALT |
| | | SGVHTFPAVLQSSGLYSLSSVVTVPS |
| | | SSLGTQTYICNVNHKPSNTKVDKKV |
| | | EPKSCDKTHTCPPCPAPELLGGPSVFL |
| | | FPPKPKDTLMISRTPEVTCVVVDVSH |
| | | EDPEVKFNWYVDGVEVHNAKTKPR |
| | | EEQYNSTYRVVSVLTVLHQDWLNG |
| | | KEYKCKVSNKALPAPIEKTISKAKGQ |
| | | PREPQVYTLPPSREEMTKNQVSLTCL |
| | | VKGFYPSDIAVEWESNGQPENNYKT |
| | | TPPVLDSDGSFFLYSKLTVDKSRWQQ |
| | | GNVFSCSVMHEALHNHYTQKSLSLS |
| | | PG |
| 1252 | Hu anti-huCCR8 LIBC321845-1 HuIgG1z | QVQVVESGGGVVQPGRSLRLSCGAS |
| | mAb_HC_no Cterm K | GFTFSGYGMHWVRQAPGKGLEWVA |
| | | VISYDGSNKYYADSVKGRFTISRDNS |
| | | KNTLYLQMNSLRGEDTAVYYCARV |
| | | YYGSGIYYKNRYYYGMDVWGQGTT |
| | | VAVSSASTKGPSVFPLAPSSKSTSGGT |
| | | AALGCLVKDYFPEPVTVSWNSGALT |
| | | SGVHTFPAVLQSSGLYSLSSVVTVPS |
| | | SSLGTQTYICNVNHKPSNTKVDKKV |
| | | EPKSCDKTHTCPPCPAPELLGGPSVFL |
| | | FPPKPKDTLMISRTPEVTCVVVDVSH |
| | | EDPEVKFNWYVDGVEVHNAKTKPR |
| | | EEQYNSTYRVVSVLTVLHQDWLNG |
| | | KEYKCKVSNKALPAPIEKTISKAKGQ |
| | | PREPQVYTLPPSREEMTKNQVSLTCL |
| | | VKGFYPSDIAVEWESNGQPENNYKT |
| | | TPPVLDSDGSFFLYSKLTVDKSRWQQ |
| | | GNVFSCSVMHEALHNHYTQKSLSLS |
| | | PG |
| 1253 | Hu anti-huCCR8 LIBC322176-1 HuIgG1z | QVQLVESGGGVVQPGRSLRLSCAAS |
| | mAb_HC_no Cterm K | GLNFSNFGMHWVRQAPGKGLDWVA |
| | | VISYDGGNKYYADSVKGRFTVSRDN |
| | | SKNTLFLQMNSLRAEDTALYYCAKV |
| | | YYGSGSYYKKRYYYGMDVWGQGT |
| | | TVTVSSASTKGPSVFPLAPSSKSTSGG |
| | | TAALGCLVKDYFPEPVTVSWNSGAL |
| | | TSGVHTFPAVLQSSGLYSLSSVVTVP |
| | | SSSLGTQTYICNVNHKPSNTKVDKKV |
| | | EPKSCDKTHTCPPCPAPELLGGPSVFL |
| | | FPPKPKDTLMISRTPEVTCVVVDVSH |
| | | EDPEVKFNWYVDGVEVHNAKTKPR |
| | | EEQYNSTYRVVSVLTVLHQDWLNG |
| | | KEYKCKVSNKALPAPIEKTISKAKGQ |
| | | PREPQVYTLPPSREEMTKNQVSLTCL |
| | | VKGFYPSDIAVEWESNGQPENNYKT |
| | | TPPVLDSDGSFFLYSKLTVDKSRWQQ |
| | | GNVFSCSVMHEALHNHYTQKSLSLS |
| | | PG |
| 1254 | Hu anti-huCCR8 LIBC323412-1 HuIgG1z | QVQLVESGGGVVQPGRSLRLSCAAS |
| | mAb_HC_no Cterm K | GFNFSSCGMHWVRQAPGKGLEWVA |
| | | VISYDGTNKYYADSVKGRFTISRDNS |
| | | KNTLYLQMNSLRAEDTAVYYCAKV |
| | | YYGSGIYYKKNYYYGMDVWGQGTT |
| | | VTVSSASTKGPSVFPLAPSSKSTSGGT |
| | | AALGCLVKDYFPEPVTVSWNSGALT |
| | | SGVHTFPAVLQSSGLYSLSSVVTVPS |
| | | SSLGTQTYICNVNHKPSNTKVDKKV |
| | | EPKSCDKTHTCPPCPAPELLGGPSVFL |
| | | FPPKPKDTLMISRTPEVTCVVVDVSH |
| | | EDPEVKFNWYVDGVEVHNAKTKPR |
| | | EEQYNSTYRVVSVLTVLHQDWLNG |
| | | KEYKCKVSNKALPAPIEKTISKAKGQ |
| | | PREPQVYTLPPSREEMTKNQVSLTCL |
| | | VKGFYPSDIAVEWESNGQPENNYKT |
| | | TPPVLDSDGSFFLYSKLTVDKSRWQQ |
| | | GNVFSCSVMHEALHNHYTQKSLSLS |
| | | PG |

The application's sequence listing, which the Patent Office published only in electronic form, follows.

SEQUENCE LISTING (1254 sequences)

SEQ ID NO: 1 - protein, 5 aa, synthetic construct
  REGION 1..5: note = Synthetic Peptide
NARMG

SEQ ID NO: 2 - protein, 19 aa, synthetic construct
  REGION 1..19: note = Synthetic Peptide
RIKSKTEGGTRDYAAPVKG

SEQ ID NO: 3 - protein, 4 aa, synthetic construct
  REGION 1..4: note = Synthetic Peptide
YSGV

SEQ ID NO: 4 - protein, 17 aa, synthetic construct
  REGION 1..17: note = Synthetic Peptide
KSSQSVLYSSNNKNYLA

SEQ ID NO: 5 - protein, 7 aa, synthetic construct
  REGION 1..7: note = Synthetic Peptide
WASTRES

SEQ ID NO: 6 - protein, 9 aa, synthetic construct
  REGION 1..9: note = Synthetic Peptide
QQYYSIPIT

SEQ ID NO: 7 - protein, 5 aa, synthetic construct
  REGION 1..5: note = Synthetic Peptide
NYGMH

SEQ ID NO: 8 - protein, 17 aa, synthetic construct
  REGION 1..17: note = Synthetic Peptide
VISYDGSNKFYADSVKG

SEQ ID NO: 9 - protein, 9 aa, synthetic construct
  REGION 1..9: note = Synthetic Peptide
AGGIGRFDY

SEQ ID NO: 10 - protein, 9 aa, synthetic construct
  REGION 1..9: note = Synthetic Peptide
AGGIGRFDY

SEQ ID NO: 11 - protein, 7 aa, synthetic construct
  REGION 1..7: note = Synthetic Peptide
EVSNRFS

SEQ ID NO: 12 - protein, 7 aa, synthetic construct
  REGION 1..7: note = Synthetic Peptide
EVSNRFS

SEQ ID NO: 13 - protein, 115 aa, synthetic construct
  REGION 1..115: note = Synthetic Peptide
EVQLVESGGGLVKPGGSLRLSCAASGFTFSNARMGWVRQAPGKGLEWVGRIKSKTEGGTRDYAAPVKGRFTISRDDSKNTLYLQMNSLKTEDTAVYYCTSYSGVWGQGTMVTVSS

SEQ ID NO: 14 - protein, 114 aa, synthetic construct
  REGION 1..114: note = Synthetic Peptide
DIVMTQSPDSLAVSLGERATINCKSSQSVLYSSNNKNYLAWYHQKPGQSPKLLISWASTRESGVPDRFSGSGSGTDFTLTINSLQAEDVAVYYCQQYYSIPITFGGGTKVEIKR

SEQ ID NO: 15 - protein, 441 aa, synthetic construct
  REGION 1..441: note = Synthetic Peptide
EVQLVESGGGLVKPGGSLRLSCAASGFTFSNARMGWVRQAPGKGLEWVGRIKSKTEGGTRDYAAPVKGRFTISRDDSKNTLYLQMNSLKTEDTAVYYCTSYSGVWGQGTMVTVSSASTKGPSVFPLAPCSRSTSESTAALGCLVKDYFPEPVTVSWNSGALTSGVHTFPAVLQSSGLYSLSSVVTVPSSNFGTQTYTCNVDHKPSNTKVDKTVERKCCVECPPCPAPPVAGPSVFLFPPKPKDTLMISRTPEVTCVVVDVSHEDPEVQFNWYVDGVEVHNAKTKPREEQFNSTFRVVSVLTVVHQDWLNGKEYKCKVSNKGLPAPIEKTISKTKGQPREPQVYTLPPSREEMTKNQVSLTCLVKGFYPSDIAVEWESNGQPENNYKTTPPMLDSDGSFFLYSKLTVDKSRWQQGNVFSCSVMHEALHNHYTQKSLSLSPGK

SEQ ID NO: 16 - protein, 220 aa, synthetic construct
  REGION 1..220: note = Synthetic Peptide
DIVMTQSPDSLAVSLGERATINCKSSQSVLYSSNNKNYLAWYHQKPGQSPKLLISWASTRESGVPDRFSGSGSGTDFTLTINSLQAEDVAVYYCQQYYSIPITFGGGTKVEIKRTVAAPSVFIFPPSDEQLKSGTASVVCLLNNFYPREAKVQWKVDNALQSGNSQESVTEQDSKDSTYSLSSTLTLSKADYEKHKVYACEVTHQGLSSPVTKSFNRGEC

SEQ ID NO: 17 - protein, 118 aa, synthetic construct
  REGION 1..118: note = Synthetic Peptide
QVQLVESGGGVVQPGRSLRLSCAASGFTFSNYGMHWVRQAPGKGLEWVAVISYDGSNKFYADSVKGRFTISRDNSKKTLYLQMSSLRVEDTAVYYCARAGGIGRFDYWGQGTLVTVSS

SEQ ID NO: 18 - protein, 112 aa, synthetic construct
  REGION 1..112: note = Synthetic Peptide
DFVMTQTPLSLSVTPGQPASISCKYSQSLLHSDGKTYLFWYLQKPGQPPHLLIYEVSNRFSGVPDRFSGSGSGTDFTLKISRVEAEDVGLYYCMQTLKLPLTFGGGTKVEIN

SEQ ID NO: 19 - protein, 444 aa, synthetic construct
  REGION 1..444: note = Synthetic Peptide
QVQLVESGGGVVQPGRSLRLSCAASGFTFSNYGMHWVRQAPGKGLEWVAVISYDGSNKFYADSVKGRFTISRDNSKKTLYLQMSSLRVEDTAVYYCARAGGIGRFDYWGQGTLVTVSSASTKGPSVFPLAPCSRSTSESTAALGCLVKDYFPEPVTVSWNSGALTSGVHTFPAVLQSSGLYSLSSVVTVPSSNFGTQTYTCNVDHKPSNTKVDKTVERKCCVECPPCPAPPVAGPSVFLFPPKPKDTLMISRTPEVTCVVVDVSHEDPEVQFNWYVDGVEVHNAKTKPREEQFNSTFRVVSVLTVVHQDWLNGKEYKCKVSNKGLPAPIEKTISKTKGQPREPQVYTLPPSREEMTKNQVSLTCLVKGFYPSDIAVEWESNGQPENNYKTTPPMLDSDGSFFLYSKLTVDKSRWQQGNVFSCSVMHEALHNHYTQKSLSLSPGK

SEQ ID NO: 20 - protein, 219 aa, synthetic construct
  REGION 1..219: note = Synthetic Peptide
DFVMTQTPLSLSVTPGQPASISCKYSQSLLHSDGKTYLFWYLQKPGQPPHLLIYEVSNRFSGVPDRFSGSGSGTDFTLKISRVEAEDVGLYYCMQTLKLPLTFGGGTKVEINRTVAAPSVFIFPPSDEQLKSGTASVVCLLNNFYPREAKVQWKVDNALQSGNSQESVTEQDSKDSTYSLSSTLTLSKADYEKHKVYACEVTHQGLSSPVTKSFNRGEC

SEQ ID NO: 21 - protein, 355 aa, synthetic construct
  REGION 1..355: note = Synthetic Peptide
MDYTLDLSVTTVTDYYYPDIFSSPCDAELIQTNGKLLLAVFYCLLFVFSLLGNSLVILVLVVCKKLRSITDVYLLNLALSDLLFVFSFPFQTYYLLDQWVFGTVMCKVVSGFYYIGFYSSMFFITLMSVDRYLAVVHAVYALKVRTIRMGTTLCLAVWLTAIMATIPLLVFYQVASEDGVLQCYSFYNQQTLKWKIFTNFKMNILGLLIPFTIFMFCYIKILHQLKRCQNHNKTKAIRLVLIVVIASLLFWVPFNVVLFLTSLHSMHILDGCSISQQLTYATHVTEIISFTHCCVNPVIYAFVGEKFKKHLSEIFQKSCSQIFNYLGRQMPRESCEKSSSCQQHSSRSSSVDYIL

SEQ ID NO: 22 - protein, 355 aa, synthetic construct
  REGION 1..355: note = Synthetic Peptide
MDYTLDPSMTTMTDYYYPDSLSSPCDGELIQRNDKLLLAVFYCLLFVFSLLGNSLVILVLVVCKKLRNITDIYLLNLALSDLLFVFSFPFQTYYQLDQWVFGTVMCKVVSGFYYIGFYSSMFFITLMSVDRYLAVVHAVYAIKVRTIRMGTTLSLVVWLTAIMATIPLLVFYQVASEDGVLQCYSFYNQQTLKWKIFTNFEMNILGLLIPFTIFMFCYIKILHQLKRCQNHNKTKAIRLVLIVVIASLLFWVPFNVVLFLTSLHSMHILDGCSISQQLNYATHVTEIISFTHCCVNPVIYAFVGEKFKKHLSEIFQKSCSHIFIYLGRQMPRESCEKSSSCQQHSFRSSSIDYIL

SEQ ID NO: 23 - protein, 355 aa, synthetic construct [sequence omitted]

SEQ ID NO: 24 - protein, 353 aa, synthetic construct
  REGION 1..353: note = Synthetic Peptide
MDYTMEPNVTMTDYYPDFFTAPCDAEFLLRGSMLYLAILYCVLFVLGLLGNSLVILVLVGCKKLRSITDIYLLNLAASDLLFVLSIPFQTHNLLDQWVFGTAMCKVVSGLYYIGFFSSMFFITLMSVDRYLAIVHAVYAIKVRTASVGTALSLTVWLAAVTATIPLMVFYQVASEDGMLQCFQFYEEQSLRWKLFTHFEINALGLLLPFAILLFCYVRILQQLRGCLNHNRTRAIKLVLTVVIVSLLFWVPFNVALFLTSLHDLHILDGCATRQRLALAIHVTEVISFTHCCVNPVIYAFIGEKFKKHLMDVFQKSCSHIFLYLGRQMPVGALERQLSSNQRSSHSSTLDDIL

SEQ ID NO: 25 - protein, 353 aa, synthetic construct
  REGION 1..353: note = Synthetic Peptide
MDYTLEPNVTMTDYYPDFFTTPCDTELLLRGGTLYLAVLYCILFVLGLLGNSLVILVLVACKKLRSITDVYLLNLAASDLLFVLSIPFQTHNLLDQWVFGTVMCKVVSGLYYIGFFSSMLFITLMSVDRYLAVVHPVHAIKVRTARVGTALSLAVWLAAIAATVPLMVFYQVSSEDGMLQCFQLYDEQSLRWKLFTHFEVNALGLLLPFAILLFCYVRILQQLRGCLNHNRTRAIKLVLTIVVVSLLFWVPFNVVLFLTSLHDMHILEGCATRQRLALATHVTEVISFMHCCVNPVIYAFIGEKFKKHLVDVFQKSCSHIFLYVGRQMPVGALERQLSSNQRSSHSSTLDYIL

SEQ ID NO: 26 - protein, 360 aa, synthetic construct
  REGION 1..360: note = Synthetic Peptide
MNPTDIADTTLDESIYSNYYLYESIPKPCTKEGIKAFGELFLPPLYSLVFVFGLLGNSVVVLVLFKYKRLRSMTDVYLLNLAISDLLFVFSLPFWGYYAADQWVFGLGLCKMISWMYLVGFYSGIFFVMLMSIDRYLAIVHAVFSLRARTLTYGVITSLATWSVAVFASLPGFLFSTCYTERNHTYCKTKYSLNSTTWKVLSSLEINILGLVIPLGIMLFCYSMIIRTLQHCKNEKKNKAVKMIFAVVVLFLGFWTPYNIVLFLETLVELEVLQDCTFERYLDYAIQATETLAFVHCCLNPIIYFFLGEKFRKYILQLFKTCRGLFVLCQYCGLLQIYSADTPSSSYTQSTMDHDLHDAL

SEQ ID NO: 27 - DNA, 1326 bp, synthetic construct
  misc_feature 1..1326: note = Synthetic Peptide
  source 1..1326: mol_type = other DNA
gaggtgcagctggtggagtctgggggaggcttggtaaagcctggggggtccctgagactctcctgtgcagcctctggatttactttcagtaacgcccggatgggctgggtccgccaggctccagggaaggggctggagtgggttggccgtattaaaagcaaaactgaaggtgggacaagagactacgctgcacccgtgaaaggcagattcaccatctcaagagatgattcaaaaaacacgctgtatctgcaaatgaacagcctgaaaaccgaggacacagccgtgtattattgtacctcgtatagtggggtctggggccaagggacaatggtcaccgtctcttcagcctccaccaagggcccatcggtcttccccctggcgccctgctccaggagcacctccgagagcacagcggccctgggctgcctggtcaaggactacttccccgaaccggtgacggtgtcgtggaactcaggcgctctgaccagcggcgtgcacaccttcccagctgtcctacagtcctcaggactctactccctcagcagcgtggtgaccgtgccctccagcaacttcggcacccagacctacacctgcaacgtagatcacaagcccagcaacaccaaggtggacaagacagttgagcgcaaatgttgtgtcgagtgcccaccgtgcccagcaccacctgtggcaggaccgtcagtcttcctcttccccccaaaacccaaggacaccctcatgatctcccggacccctgaggtcacgtgcgtggtggtggacgtgagccacgaagaccccgaggtccagttcaactggtacgtggacggcgtggaggtgcataatgccaagacaaagccacgggaggagcagttcaacagcacgttccgtgtggtcagcgtcctcaccgttgtgcaccaggactggctgaacggcaaggagtacaagtgcaaggtctccaacaaaggcctcccagcccccatcgagaaaaccatctccaaaaccaaagggcagccccgagaaccacaggtgtacaccctgcccccatcccgggaggagatgaccaagaaccaggtcagcctgacctgcctggtcaaaggcttctaccccagcgacatcgccgtggagtgggagagcaatgggcagccggagaacaactacaagaccacacctcccatgctggactccgacggctccttcttcctctacagcaagctcaccgtggacaagagcaggtggcagcaggggaacgtcttctcatgctccgtgatgcatgaggctctgcacaaccactacacgcagaagagcctctccctgtctccgggtaaatag

SEQ ID NO: 28 - DNA, 342 bp, synthetic construct
  misc_feature 1..342: note = Synthetic Peptide
  source 1..342: mol_type = other DNA
gacatcgtgatgacccagtctccagactccctggctgtgtctctgggcgagagggccaccatcaactgcaagtccagccagagtgttttatacagttccaacaataagaactacttagcttggtaccatcagaaaccaggacagtctcctaagctgctcatttcctgggcatctacccgggaatccggggtccctgaccgattcagtggcagcgggtctgggacagatttcactctcaccatcaacagcctgcaggctgaagatgtggcagtttattactgtcaacaatattatagtattccgatcactttcggcggagggaccaaggtggagatcaaacga

SEQ ID NO: 29 - DNA, 1335 bp, synthetic construct
  misc_feature 1..1335: note = Synthetic Peptide
  source 1..1335: mol_type = other DNA
caggtgcagttggtggagtctgggggaggcgtggtccagcctgggaggtccctgagactctcctgtgcagcctctggattcaccttcagtaactatggcatgcactgggtccgccaggctccaggcaaggggctggagtgggtggcagtcatatcatatgatggaagtaataaattctatgcagactccgtgaagggccgattcaccatctccagagacaattccaagaagactctgtatcttcaaatgagcagcctgagagttgaggacacggctgtatattattgtgcgagagccgggggtatagggcgttttgactactggggccagggaaccctggtcaccgtctcctcagcctccaccaagggcccatcggtcttccccctggcgccctgctccaggagcacctccgagagcacagcggccctgggctgcctggtcaaggactacttccccgaaccggtgacggtgtcgtggaactcaggcgctctgaccagcggcgtgcacaccttcccagctgtcctacagtcctcaggactctactccctcagcagcgtggtgaccgtgccctccagcaacttcggcacccagacctacacctgcaacgtagatcacaagcccagcaacaccaaggtggacaagacagttgagcgcaaatgttgtgtcgagtgcccaccgtgcccagcaccacctgtggcaggaccgtcagtcttcctcttccccccaaaacccaaggacaccctcatgatctcccggacccctgaggtcacgtgcgtggtggtggacgtgagccacgaagaccccgaggtccagttcaactggtacgtggacggcgtggaggtgcataatgccaagacaaagccacgggaggagcagttcaacagcacgttccgtgtggtcagcgtcctcaccgttgtgcaccaggactggctgaacggcaaggagtacaagtgcaaggtctccaacaaaggcctcccagcccccatcgagaaaaccatctccaaaaccaaagggcagccccgagaaccacaggtgtacaccctgcccccatcccgggaggagatgaccaagaaccaggtcagcctgacctgcctggtcaaaggcttctaccccagcgacatcgccgtggagtgggagagcaatgggcagccggagaacaactacaagaccacacctcccatgctggactccgacggctccttcttcctctacagcaagctcaccgtggacaagagcaggtggcagcaggggaacgtcttctcatgctccgtgatgcatgaggctctgcacaaccactacacgcagaagagcctctccctgtctccgggtaaatag

SEQ ID NO: 30 - DNA, 339 bp, synthetic construct
  misc_feature 1..339: note = Synthetic Peptide
  source 1..339: mol_type = other DNA
gattttgtaatgacccagactccactctctctgtccgtcacccctggacagccggcctccatctcctgcaagtatagtcagagcctcctgcacagtgatggaaagacctatttgttttggtacctgcagaagccaggccagcctccacacctcctgatctatgaagtttccaaccggttctctggagtgccagataggttcagtggcagcgggtcagggacagatttcacactgaagatcagccgggtggaggctgaggatgttgggctttattactgcatgcaaactttaaagcttccgctcactttcggcggagggaccaaggtggagatcaaccga

SEQ ID NO: 31 - protein, 35 aa, synthetic construct
  REGION 1..35: note = Synthetic Peptide
MDYTLDLSVTTVTDYYYPDIFSSPCDAELIQTNGK

SEQ ID NO: 32 - protein, 11 aa, synthetic construct
  REGION 1..11: note = Synthetic Peptide
RASQGISNWLA

SEQ ID NO: 33 - protein, 7 aa, synthetic construct
  REGION 1..7: note = Synthetic Peptide
AASSLQS

SEQ ID NO: 34 - protein, 9 aa, synthetic construct
  REGION 1..9: note = Synthetic Peptide
QQAESFPHT

SEQ ID NO: 35 - protein, 5 aa, synthetic construct
  REGION 1..5: note = Synthetic Peptide
SYDMS

SEQ ID NO: 36 - protein, 17 aa, synthetic construct
  REGION 1..17: note = Synthetic Peptide
LISGGGSQTYYAESVKG

SEQ ID NO: 37 - protein, 11 aa, synthetic construct
  REGION 1..11: note = Synthetic Peptide
PSGHYFYAMDV

SEQ ID NO: 38 - protein, 107 aa, synthetic construct
  REGION 1..107: note = Synthetic Peptide
DIQMTQSPSSVSASVGDRVTITCRASQGISNWLAWYQQKPGKAPKLLIFAASSLQSGVPSRFSGSGSGTDFTLTISSLQPEDFATYYCQQAESFPHTFGGGTKVEIK

SEQ ID NO: 39 - protein, 120 aa, synthetic construct
  REGION 1..120: note = Synthetic Peptide
EVQLLESGGGLVQPGGSLRLSCAASGFTFSSYDMSWVRQAPGKGLEWVSLISGGGSQTYYAESVKGRFTISRDNSKNTLYLQMNSLRAEDTAVYFCASPSGHYFYAMDVWGQGTTVTVSS

SEQ ID NO: 40 - protein, 214 aa, synthetic construct
  REGION 1..214: note = Synthetic Peptide
DIQMTQSPSSVSASVGDRVTITCRASQGISNWLAWYQQKPGKAPKLLIFAASSLQSGVPSRFSGSGSGTDFTLTISSLQPEDFATYYCQQAESFPHTFGGGTKVEIKRTVAAPSVFIFPPSDEQLKSGTASVVCLLNNFYPREAKVQWKVDNALQSGNSQESVTEQDSKDSTYSLSSTLTLSKADYEKHKVYACEVTHQGLSSPVTKSFNRGEC

SEQ ID NO: 41 - protein, 450 aa, synthetic construct
  REGION 1..450: note = Synthetic Peptide
EVQLLESGGGLVQPGGSLRLSCAASGFTFSSYDMSWVRQAPGKGLEWVSLISGGGSQTYYAESVKGRFTISRDNSKNTLYLQMNSLRAEDTAVYFCASPSGHYFYAMDVWGQGTTVTVSSASTKGPSVFPLAPSSKSTSGGTAALGCLVKDYFPEPVTVSWNSGALTSGVHTFPAVLQSSGLYSLSSVVTVPSSSLGTQTYICNVNHKPSNTKVDKKVEPKSCDKTHTCPPCPAPELLGGPSVFLFPPKPKDTLMISRTPEVTCVVVDVSHEDPEVKFNWYVDGVEVHNAKTKPCEEQYGSTYRCVSVLTVLHQDWLNGKEYKCKVSNKALPAPIEKTISKAKGQPREPQVYTLPPSREEMTKNQVSLTCLVKGFYPSDIAVEWESNGQPENNYKTTPPVLDSDGSFFLYSKLTVDKSRWQQGNVFSCSVMHEALHNHYTQKSLSLSPGK

SEQ ID NO: 42 - protein, 11 aa, synthetic construct
  REGION 1..11: note = Synthetic Peptide
SGDKLGDKYAS

SEQ ID NO: 43 - protein, 7 aa, synthetic construct
  REGION 1..7: note = Synthetic Peptide
QDRKRPS

SEQ ID NO: 44 - protein, 9 aa, synthetic construct
  REGION 1..9: note = Synthetic Peptide
QAFESSTEV

SEQ ID NO: 45 - protein, 5 aa, synthetic construct
  REGION 1..5: note = Synthetic Peptide
NYGMH

SEQ ID NO: 46 - protein, 17 aa, synthetic construct
  REGION 1..17: note = Synthetic Peptide
LIWYDASKKYYAESVKG

SEQ ID NO: 47 - protein, 16 aa, synthetic construct
  REGION 1..16: note = Synthetic Peptide
DPSSLTGSTGYYGMDV

SEQ ID NO: 48 - protein, 106 aa, synthetic construct
  REGION 1..106: note = Synthetic Peptide
SYELTQPPSVSVSPGQTASITCSGDKLGDKYASWYQQKPGQSPVLVIYQDRKRPSGIPERFSGSNSGNTATLTISGTQAMDEADYYCQAFESSTEVFGGGTKLTVL

SEQ ID NO: 49 - protein, 125 aa, synthetic construct
  REGION 1..125: note = Synthetic Peptide
QVQLVESGGGVVQPGRSLRLSCAASGFTFSNYGMHWVRQAPGKGLEWVALIWYDASKKYYAESVKGRFTISRDNSKNTLYLQMNSLRAEDTAAYYCARDPSSLTGSTGYYGMDVWGQGTTVTVSS

SEQ ID NO: 50 - protein, 212 aa, synthetic construct
  REGION 1..212: note = Synthetic Peptide
SYELTQPPSVSVSPGQTASITCSGDKLGDKYASWYQQKPGQSPVLVIYQDRKRPSGIPERFSGSNSGNTATLTISGTQAMDEADYYCQAFESSTEVFGGGTKLTVLGQPKAAPSVTLFPPSSEELQANKATLVCLISDFYPGAVTVAWKADSSPVKAGVETTTPSKQSNNKYAASSYLSLTPEQWKSHRSYSCQVTHEGSTVEKTVAPTECS

SEQ ID NO: 51 - protein, 455 aa, synthetic construct
  REGION 1..455: note = Synthetic Peptide
QVQLVESGGGVVQPGRSLRLSCAASGFTFSNYGMHWVRQAPGKGLEWVALIWYDASKKYYAESVKGRFTISRDNSKNTLYLQMNSLRAEDTAAYYCARDPSSLTGSTGYYGMDVWGQGTTVTVSSASTKGPSVFPLAPSSKSTSGGTAALGCLVKDYFPEPVTVSWNSGALTSGVHTFPAVLQSSGLYSLSSVVTVPSSSLGTQTYICNVNHKPSNTKVDKKVEPKSCDKTHTCPPCPAPELLGGPSVFLFPPKPKDTLMISRTPEVTCVVVDVSHEDPEVKFNWYVDGVEVHNAKTKPCEEQYGSTYRCVSVLTVLHQDWLNGKEYKCKVSNKALPAPIEKTISKAKGQPREPQVYTLPPSREEMTKNQVSLTCLVKGFYPSDIAVEWESNGQPENNYKTTPPVLDSDGSFFLYSKLTVDKSRWQQGNVFSCSVMHEALHNHYTQKSLSLSPGK

SEQ ID NO: 52 - protein, 11 aa, synthetic construct
  REGION 1..11: note = Synthetic Peptide
SGDALPKKYAY

SEQ ID NO: 53 - protein, 7 aa, synthetic construct
  REGION 1..7: note = Synthetic Peptide
EDAKRPS

SEQ ID NO: 54 - protein, 11 aa, synthetic construct
  REGION 1..11: note = Synthetic Peptide
YSTDASGNHRV

SEQ ID NO: 55 - protein, 5 aa, synthetic construct
  REGION 1..5: note = Synthetic Peptide
DYSMS

SEQ ID NO: 56 - protein, 17 aa, synthetic construct
  REGION 1..17: note = Synthetic Peptide
GINWNGGRTRYADAVKG

SEQ ID NO: 57 - protein, 12 aa, synthetic construct
  REGION 1..12: note = Synthetic Peptide
EFNNFESNWFDP

SEQ ID NO: 58 - protein, 108 aa, synthetic construct
  REGION 1..108: note = Synthetic Peptide
SYELTQPPSVSVSPGQTARITCSGDALPKKYAYWYQQKPGQAPVLVISEDAKRPSGIPERFSGSSSGTMATLTISGAQVEDEADYYCYSTDASGNHRVFGGGTKLTVL

SEQ ID NO: 59 - protein, 121 aa, synthetic construct
  REGION 1..121: note = Synthetic Peptide
EVQLVESGGSVVRPGGSLRLSCAASGFTVDDYSMSWVRQVPGKGLEWVSGINWNGGRTRYADAVKGRFTISRDSAKNSLYLQMNSLRAEDTALYYCAREFNNFESNWFDPWGQGTLVTVSS

SEQ ID NO: 60 - protein, 214 aa, synthetic construct
  REGION 1..214: note = Synthetic Peptide
SYELTQPPSVSVSPGQTARITCSGDALPKKYAYWYQQKPGQAPVLVISEDAKRPSGIPERFSGSSSGTMATLTISGAQVEDEADYYCYSTDASGNHRVFGGGTKLTVLGQPKAAPSVTLFPPSSEELQANKATLVCLISDFYPGAVTVAWKADSSPVKAGVETTTPSKQSNNKYAASSYLSLTPEQWKSHRSYSCQVTHEGSTVEKTVAPTECS

SEQ ID NO: 61 - protein, 451 aa, synthetic construct
  REGION 1..451: note = Synthetic Peptide
EVQLVESGGSVVRPGGSLRLSCAASGFTVDDYSMSWVRQVPGKGLEWVSGINWNGGRTRYADAVKGRFTISRDSAKNSLYLQMNSLRAEDTALYYCAREFNNFESNWFDPWGQGTLVTVSSASTKGPSVFPLAPSSKSTSGGTAALGCLVKDYFPEPVTVSWNSGALTSGVHTFPAVLQSSGLYSLSSVVTVPSSSLGTQTYICNVNHKPSNTKVDKKVEPKSCDKTHTCPPCPAPELLGGPSVFLFPPKPKDTLMISRTPEVTCVVVDVSHEDPEVKFNWYVDGVEVHNAKTKPCEEQYGSTYRCVSVLTVLHQDWLNGKEYKCKVSNKALPAPIEKTISKAKGQPREPQVYTLPPSREEMTKNQVSLTCLVKGFYPSDIAVEWESNGQPENNYKTTPPVLDSDGSFFLYSKLTVDKSRWQQGNVFSCSVMHEALHNHYTQKSLSLSPGK

SEQ ID NO: 62 - protein, 11 aa, synthetic construct
  REGION 1..11: note = Synthetic Peptide
SGDALPKKYAY

SEQ ID NO: 63 - protein, 7 aa, synthetic construct
  REGION 1..7: note = Synthetic Peptide
EDAKRPS

SEQ ID NO: 64 - protein, 11 aa, synthetic construct
  REGION 1..11: note = Synthetic Peptide
YSTDASGNHRV

SEQ ID NO: 65 - protein, 5 aa, synthetic construct
  REGION 1..5: note = Synthetic Peptide
DYSMS

SEQ ID NO: 66 - protein, 17 aa, synthetic construct
  REGION 1..17: note = Synthetic Peptide
GINWNAGRTRYADAVKG

SEQ ID NO: 67 - protein, 12 aa, synthetic construct
  REGION 1..12: note = Synthetic Peptide
EFNNFESNWFDP

SEQ ID NO: 68 - protein, 108 aa, synthetic construct; identical to SEQ ID NO: 58
  REGION 1..108: note = Synthetic Peptide

SEQ ID NO: 69 - protein, 121 aa, synthetic construct
  REGION 1..121: note = Synthetic Peptide
EVQLVESGGSVVRPGGSLRLSCAASGFTVDDYSMSWVRQVPGKGLEWVSGINWNAGRTRYADAVKGRFTISRDSAKNSLYLQMNSLRAEDTALYYCAREFNNFESNWFDPWGQGTLVTVSS

SEQ ID NO: 70 - protein, 214 aa, synthetic construct; identical to SEQ ID NO: 60
  REGION 1..214: note = Synthetic Peptide

SEQ ID NO: 71 - protein, 451 aa, synthetic construct
  REGION 1..451: note = Synthetic Peptide
EVQLVESGGSVVRPGGSLRLSCAASGFTVDDYSMSWVRQVPGKGLEWVSGINWNAGRTRYADAVKGRFTISRDSAKNSLYLQMNSLRAEDTALYYCAREFNNFESNWFDPWGQGTLVTVSSASTKGPSVFPLAPSSKSTSGGTAALGCLVKDYFPEPVTVSWNSGALTSGVHTFPAVLQSSGLYSLSSVVTVPSSSLGTQTYICNVNHKPSNTKVDKKVEPKSCDKTHTCPPCPAPELLGGPSVFLFPPKPKDTLMISRTPEVTCVVVDVSHEDPEVKFNWYVDGVEVHNAKTKPCEEQYGSTYRCVSVLTVLHQDWLNGKEYKCKVSNKALPAPIEKTISKAKGQPREPQVYTLPPSREEMTKNQVSLTCLVKGFYPSDIAVEWESNGQPENNYKTTPPVLDSDGSFFLYSKLTVDKSRWQQGNVFSCSVMHEALHNHYTQKSLSLSPGK

SEQ ID NO: 72 - protein, 11 aa, synthetic construct
  REGION 1..11: note = Synthetic Peptide
RASQGISNWLA

SEQ ID NO: 73 - protein, 7 aa, synthetic construct
  REGION 1..7: note = Synthetic Peptide
AASSLQS

SEQ ID NO: 74 - protein, 9 aa, synthetic construct
  REGION 1..9: note = Synthetic Peptide
QQAESFPHT

SEQ ID NO: 75 - protein, 5 aa, synthetic construct
  REGION 1..5: note = Synthetic Peptide
SYDMS

SEQ ID NO: 76 - protein, 17 aa, synthetic construct
  REGION 1..17: note = Synthetic Peptide
LISGGGSNTYYAESVKG

SEQ ID NO: 77 - protein, 11 aa, synthetic construct
  REGION 1..11: note = Synthetic Peptide
PSGHYFYAMDV

SEQ ID NO: 78 - protein, 107 aa, synthetic construct; identical to SEQ ID NO: 38
  REGION 1..107: note = Synthetic Peptide

SEQ ID NO: 79 - protein, 120 aa, synthetic construct
  REGION 1..120: note = Synthetic Peptide
EVQLLESGGGLVQPGGSLRLSCAASGFTFSSYDMSWVRQAPGKGLEWVSLISGGGSNTYYAESVKGRFTISRDNSKNTLYLQMNSLRAEDTAVYFCASPSGHYFYAMDVWGQGTTVTVSS

SEQ ID NO: 80 - protein, 214 aa, synthetic construct; identical to SEQ ID NO: 40
  REGION 1..214: note = Synthetic Peptide

SEQ ID NO: 81 - protein, 450 aa, synthetic construct
  REGION 1..450: note = Synthetic Peptide
EVQLLESGGGLVQPGGSLRLSCAASGFTFSSYDMSWVRQAPGKGLEWVSLISGGGSNTYYAESVKGRFTISRDNSKNTLYLQMNSLRAEDTAVYFCASPSGHYFYAMDVWGQGTTVTVSSASTKGPSVFPLAPSSKSTSGGTAALGCLVKDYFPEPVTVSWNSGALTSGVHTFPAVLQSSGLYSLSSVVTVPSSSLGTQTYICNVNHKPSNTKVDKKVEPKSCDKTHTCPPCPAPELLGGPSVFLFPPKPKDTLMISRTPEVTCVVVDVSHEDPEVKFNWYVDGVEVHNAKTKPCEEQYGSTYRCVSVLTVLHQDWLNGKEYKCKVSNKALPAPIEKTISKAKGQPREPQVYTLPPSREEMTKNQVSLTCLVKGFYPSDIAVEWESNGQPENNYKTTPPVLDSDGSFFLYSKLTVDKSRWQQGNVFSCSVMHEALHNHYTQKSLSLSPGK

SEQ ID NO: 82 - protein, 12 aa, synthetic construct
  REGION 1..12: note = Synthetic Peptide
MDYTLDLSVTTV

SEQ ID NO: 83 - protein, 12 aa, synthetic construct
  REGION 1..12: note = Synthetic Peptide
TDYYYPDIFSSP

SEQ ID NO: 84 - protein, 11 aa, synthetic construct
  REGION 1..11: note = Synthetic Peptide
CDAELIQTNGK

SEQ ID NO: 85 - protein, 12 aa, synthetic construct
  REGION 1..12: note = Synthetic Peptide
LSVTTVTDYYYP

SEQ ID NO: 86 - protein, 12 aa, synthetic construct
  REGION 1..12: note = Synthetic Peptide
DIFSSPCDAELI

SEQ ID NO: 87 - protein, 14 aa, synthetic construct
  REGION 1..14: note = Synthetic Peptide
GSSTGAVTSGNYPN

SEQ ID NO: 88 - protein, 7 aa, synthetic construct
  REGION 1..7: note = Synthetic Peptide
GTKFLAP

SEQ ID NO: 89 - protein, 9 aa, synthetic construct
  REGION 1..9: note = Synthetic Peptide
VLWYSNRWV

SEQ ID NO: 90 - protein, 5 aa, synthetic construct
  REGION 1..5: note = Synthetic Peptide
KYAMN

SEQ ID NO: 91 - protein, 19 aa, synthetic construct
  REGION 1..19: note = Synthetic Peptide
RIRSKYNNYATYYADSVKD

SEQ ID NO: 92 - protein, 14 aa, synthetic construct
  REGION 1..14: note = Synthetic Peptide
HGNFGNSYISYWAY

SEQ ID NO: 93 - protein, 125 aa, synthetic construct
  REGION 1..125: note = Synthetic Peptide
EVQLVESGGGLVQPGGSLKLSCAASGFTFNKYAMNWVRQAPGKGLEWVARIRSKYNNYATYYADSVKDRFTISRDDSKNTAYLQMNNLKTEDTAVYYCVRHGNFGNSYISYWAYWGQGTLVTVSS

SEQ ID NO: 94 - protein, 109 aa, synthetic construct
  REGION 1..109: note = Synthetic Peptide
QTVVTQEPSLTVSPGGTVTLTCGSSTGAVTSGNYPNWVQQKPGQAPRGLIGGTKFLAPGTPARFSGSLLGGKAALTLSGVQPEDEAEYYCVLWYSNRWVFGGGTKLTVL

SEQ ID NO: 95 - protein, 249 aa, synthetic construct
  REGION 1..249: note = Synthetic Peptide
EVQLVESGGGLVQPGGSLKLSCAASGFTFNKYAMNWVRQAPGKGLEWVARIRSKYNNYATYYADSVKDRFTISRDDSKNTAYLQMNNLKTEDTAVYYCVRHGNFGNSYISYWAYWGQGTLVTVSSGGGGSGGGGSGGGGSQTVVTQEPSLTVSPGGTVTLTCGSSTGAVTSGNYPNWVQQKPGQAPRGLIGGTKFLAPGTPARFSGSLLGGKAALTLSGVQPEDEAEYYCVLWYSNRWVFGGGTKLTVL

SEQ ID NO: 96 - protein, 14 aa, synthetic construct
  REGION 1..14: note = Synthetic Peptide
GSSTGAVTSGNYPN

SEQ ID NO: 97 - protein, 7 aa, synthetic construct
  REGION 1..7: note = Synthetic Peptide
GTKFLAP

SEQ ID NO: 98 - protein, 9 aa, synthetic construct
  REGION 1..9: note = Synthetic Peptide
VLWYSNRWV

SEQ ID NO: 99 - protein, 5 aa, synthetic construct
  REGION 1..5: note = Synthetic Peptide
KYAIN

SEQ ID NO: 100 - protein, 19 aa, synthetic construct
  REGION 1..19: note = Synthetic Peptide
RIRSKYNNYATYYADAVKD

SEQ ID NO: 101 - protein, 14 aa, synthetic construct
  REGION 1..14: note = Synthetic Peptide
AGNFGSSYISYWAY

SEQ ID NO: 102 - protein, 125 aa, synthetic construct
  REGION 1..125: note = Synthetic Peptide
EVQLVESGGGLVQPGGSLKLSCAASGFTFNKYAINWVRQAPGKGLEWVARIRSKYNNYATYYADAVKDRFTISRDDSKNTVYLQMNNLKTEDTAVYYCARAGNFGSSYISYWAYWGQGTLVTVSS

SEQ ID NO: 103 - protein, 109 aa, synthetic construct
  REGION 1..109: note = Synthetic Peptide
QTVVTQEPSLTVSPGGTVTITCGSSTGAVTSGNYPNWVQKKPGQAPRGLIGGTKFLAPGTPARFSGSLSGGKAALTLSGVQPEDEAEYYCVLWYSNRWVFGSGTKLTVL

SEQ ID NO: 104 - protein, 17 aa, synthetic construct
  REGION 1..17: note = Synthetic Peptide
KSSQSVLDSSTNKNSLA

SEQ ID NO: 105 - protein, 7 aa, synthetic construct
  REGION 1..7: note = Synthetic Peptide
WASTRES

SEQ ID NO: 106 - protein, 9 aa, synthetic construct
  REGION 1..9: note = Synthetic Peptide
QQSAHFPIT

SEQ ID NO: 107 - protein, 5 aa, synthetic construct
  REGION 1..5: note = Synthetic Peptide
NYGMN

SEQ ID NO: 108 - protein, 17 aa, synthetic construct
  REGION 1..17: note = Synthetic Peptide
WINTYTGEPTYADKFQG

SEQ ID NO: 109 - protein, 13 aa, synthetic construct
  REGION 1..13: note = Synthetic Peptide
WSWSDGYYVYFDY

SEQ ID NO: 110 - protein, 122 aa, synthetic construct
  REGION 1..122: note = Synthetic Peptide
QVQLVQSGAEVKKPGESVKVSCKASGYTFTNYGMNWVKQAPGQCLEWMGWINTYTGEPTYADKFQGRVTMTTDTSTSTAYMEIRNLGGDDTAVYYCARWSWSDGYYVYFDYWGQGTSVTVSS

SEQ ID NO: 111 - protein, 122 aa, synthetic construct
  REGION 1..122: note = Synthetic Peptide
QVQLVQSGAEVKKPGESVKVSCKASGYTFTNYGMNWVKQAPGQGLEWMGWINTYTGEPTYADKFQGRVTMTTDTSTSTAYMEIRNLGGDDTAVYYCARWSWSDGYYVYFDYWGQGTSVTVSS

SEQ ID NO: 112 - protein, 113 aa, synthetic construct
  REGION 1..113: note = Synthetic Peptide
DIVMTQSPDSLTVSLGERTTINCKSSQSVLDSSTNKNSLAWYQQKPGQPPKLLLSWASTRESGIPDRFSGSGSGTDFTLTIDSPQPEDSATYYCQQSAHFPITFGCGTRLEIK

SEQ ID NO: 113 - protein, 113 aa, synthetic construct
  REGION 1..113: note = Synthetic Peptide
DIVMTQSPDSLTVSLGERTTINCKSSQSVLDSSTNKNSLAWYQQKPGQPPKLLLSWASTRESGIPDRFSGSGSGTDFTLTIDSPQPEDSATYYCQQSAHFPITFGQGTRLEIK

SEQ ID NO: 114 - protein, 250 aa, synthetic construct
  REGION 1..250: note = Synthetic Peptide
QVQLVQSGAEVKKPGESVKVSCKASGYTFTNYGMNWVKQAPGQCLEWMGWINTYTGEPTYADKFQGRVTMTTDTSTSTAYMEIRNLGGDDTAVYYCARWSWSDGYYVYFDYWGQGTSVTVSSGGGGSGGGGSGGGGSDIVMTQSPDSLTVSLGERTTINCKSSQSVLDSSTNKNSLAWYQQKPGQPPKLLLSWASTRESGIPDRFSGSGSGTDFTLTIDSPQPEDSATYYCQQSAHFPITFGCGTRLEIK

SEQ ID NO: 115 - protein, 250 aa, synthetic construct
  REGION 1..250: note = Synthetic Peptide
QVQLVQSGAEVKKPGESVKVSCKASGYTFTNYGMNWVKQAPGQGLEWMGWINTYTGEPTYADKFQGRVTMTTDTSTSTAYMEIRNLGGDDTAVYYCARWSWSDGYYVYFDYWGQGTSVTVSSGGGGSGGGGSGGGGSDIVMTQSPDSLTVSLGERTTINCKSSQSVLDSSTNKNSLAWYQQKPGQPPKLLLSWASTRESGIPDRFSGSGSGTDFTLTIDSPQPEDSATYYCQQSAHFPITFGQGTRLEIK

SEQ ID NO: 116 - protein, 505 aa, synthetic construct
  REGION 1..505: note = Synthetic Peptide
QVQLVQSGAEVKKPGESVKVSCKASGYTFTNYGMNWVKQAPGQCLEWMGWINTYTGEPTYADKFQGRVTMTTDTSTSTAYMEIRNLGGDDTAVYYCARWSWSDGYYVYFDYWGQGTSVTVSSGGGGSGGGGSGGGGSDIVMTQSPDSLTVSLGERTTINCKSSQSVLDSSTNKNSLAWYQQKPGQPPKLLLSWASTRESGIPDRFSGSGSGTDFTLTIDSPQPEDSATYYCQQSAHFPITFGCGTRLEIKSGGGGSEVQLVESGGGLVQPGGSLKLSCAASGFTFNKYAMNWVRQAPGKGLEWVARIRSKYNNYATYYADSVKDRFTISRDDSKNTAYLQMNNLKTEDTAVYYCVRHGNFGNSYISYWAYWGQGTLVTVSSGGGGSGGGGSGGGGSQTVVTQEPSLTVSPGGTVTLTCGSSTGAVTSGNYPNWVQQKPGQAPRGLIGGTKFLAPGTPARFSGSLLGGKAALTLSGVQPEDEAEYYCVLWYSNRWVFGGGTKLTVL

SEQ ID NO: 117 - protein, 993 aa, synthetic construct
  REGION 1..993: note = Synthetic Peptide
QVQLVQSGAEVKKPGESVKVSCKASGYTFTNYGMNWVKQAPGQCLEWMGWINTYTGEPTYADKFQGRVTMTTDTSTSTAYMEIRNLGGDDTAVYYCARWSWSDGYYVYFDYWGQGTSVTVSSGGGGSGGGGSGGGGSDIVMTQSPDSLTVSLGERTTINCKSSQSVLDSSTNKNSLAWYQQKPGQPPKLLLSWASTRESGIPDRFSGSGSGTDFTLTIDSPQPEDSATYYCQQSAHFPITFGCGTRLEIKSGGGGSEVQLVESGGGLVQPGGSLKLSCAASGFTFNKYAMNWVRQAPGKGLEWVARIRSKYNNYATYYADSVKDRFTISRDDSKNTAYLQMNNLKTEDTAVYYCVRHGNFGNSYISYWAYWGQGTLVTVSSGGGGSGGGGSGGGGSQTVVTQEPSLTVSPGGTVTLTCGSSTGAVTSGNYPNWVQQKPGQAPRGLIGGTKFLAPGTPARFSGSLLGGKAALTLSGVQPEDEAEYYCVLWYSNRWVFGGGTKLTVLGGGGDKTHTCPPCPAPELLGGPSVFLFPPKPKDTLMISRTPEVTCVVVDVSHEDPEVKFNWYVDGVEVHNAKTKPCEEQYGSTYRCVSVLTVLHQDWLNGKEYKCKVSNKALPAPIEKTISKAKGQPREPQVYTLPPSREEMTKNQVSLTCLVKGFYPSDIAVEWESNGQPENNYKTTPPVLDSDGSFFLYSKLTVDKSRWQQGNVFSCSVMHEALHNHYTQKSLSLSPGKGGGGSGGGGSGGGGSGGGGSGGGGSGGGGSDKTHTCPPCPAPELLGGPSVFLFPPKPKDTLMISRTPEVTCVVVDVSHEDPEVKFNWYVDGVEVHNAKTKPCEEQYGSTYRCVSVLTVLHQDWLNGKEYKCKVSNKALPAPIEKTISKAKGQPREPQVYTLPPSREEMTKNQVSLTCLVKGFYPSDIAVEWESNGQPENNYKTTPPVLDSDGSFFLYSKLTVDKSRWQQGNVFSCSVMHEALHNHYTQKSLSLSPGK

SEQ ID NO: 118 - protein, 511 aa, synthetic construct
  REGION 1..511: note = Synthetic Peptide
QVQLVQSGAEVKKPGESVKVSCKASGYTFTNYGMNWVKQAPGQGLEWMGWINTYTGEPTYADKFQGRVTMTTDTSTSTAYMEIRNLGGDDTAVYYCARWSWSDGYYVYFDYWGQGTSVTVSSGGGGSGGGGSGGGGSDIVMTQSPDSLTVSLGERTTINCKSSQSVLDSSTNKNSLAWYQQKPGQPPKLLLSWASTRESGIPDRFSGSGSGTDFTLTIDSPQPEDSATYYCQQSAHFPITFGQGTRLEIKSGGGGSEVQLVESGGGLVQPGGSLKLSCAASGFTFNKYAMNWVRQAPGKGLEWVARIRSKYNNYATYYADSVKDRFTISRDDSKNTAYLQMNNLKTEDTAVYYCVRHGNFGNSYISYWAYWGQGTLVTVSSGGGGSGGGGSGGGGSQTVVTQEPSLTVSPGGTVTLTCGSSTGAVTSGNYPNWVQQKPGQAPRGLIGGTKFLAPGTPARFSGSLLGGKAALTLSGVQPEDEAEYYCVLWYSNRWVFGGGTKLTVLHHHHHH

SEQ ID NO: 119 - protein, 16 aa, synthetic construct
  REGION 1..16: note = Synthetic Peptide
RSSQSLVHSDGNTYLS

SEQ ID NO: 120 - protein, 7 aa, synthetic construct
  REGION 1..7: note = Synthetic Peptide
RISRRFS

SEQ ID NO: 121 - protein, 9 aa, synthetic construct
  REGION 1..9: note = Synthetic Peptide
MQSTHVPRT

SEQ ID NO: 122 - protein, 5 aa, synthetic construct
  REGION 1..5: note = Synthetic Peptide
NYGMH

SEQ ID NO: 123 - protein, 17 aa, synthetic construct
  REGION 1..17: note = Synthetic Peptide
VIWYDGSDKYYADSVRG

SEQ ID NO: 124 - protein, 15 aa, synthetic construct
  REGION 1..15: note = Synthetic Peptide
DGYDILTGNPRDFDY

SEQ ID NO: 125 - protein, 124 aa, synthetic construct
  REGION 1..124: note = Synthetic Peptide
QVQLVESGGGVVQSGRSLRLSCAASGFTFRNYGMHWVRQAPGKCLEWVAVIWYDGSDKYYADSVRGRFTISRDNSKNTLYLQMNSLRAEDTAVYYCARDGYDILTGNPRDFDYWGQGTLVTVSS

SEQ ID NO: 126 - protein, 112 aa, synthetic construct
  REGION 1..112: note = Synthetic Peptide
DTVMTQTPLSSHVTLGQPASISCRSSQSLVHSDGNTYLSWLQQRPGQPPRLLIYRISRRFSGVPDRFSGSGAGTDFTLEISRVEAEDVGVYYCMQSTHVPRTFGCGTKVEIK

SEQ ID NO: 127 - protein, 251 aa, synthetic construct
  REGION 1..251: note = Synthetic Peptide
QVQLVESGGGVVQSGRSLRLSCAASGFTFRNYGMHWVRQAPGKCLEWVAVIWYDGSDKYYADSVRGRFTISRDNSKNTLYLQMNSLRAEDTAVYYCARDGYDILTGNPRDFDYWGQGTLVTVSSGGGGSGGGGSGGGGSDTVMTQTPLSSHVTLGQPASISCRSSQSLVHSDGNTYLSWLQQRPGQPPRLLIYRISRRFSGVPDRFSGSGAGTDFTLEISRVEAEDVGVYYCMQSTHVPRTFGCGTKVEIK

SEQ ID NO: 128 - protein, 506 aa, synthetic construct
  REGION 1..506: note = Synthetic Peptide
QVQLVESGGGVVQSGRSLRLSCAASGFTFRNYGMHWVRQAPGKCLEWVAVIWYDGSDKYYADSVRGRFTISRDNSKNTLYLQMNSLRAEDTAVYYCARDGYDILTGNPRDFDYWGQGTLVTVSSGGGGSGGGGSGGGGSDTVMTQTPLSSHVTLGQPASISCRSSQSLVHSDGNTYLSWLQQRPGQPPRLLIYRISRRFSGVPDRFSGSGAGTDFTLEISRVEAEDVGVYYCMQSTHVPRTFGCGTKVEIKSGGGGSEVQLVESGGGLVQPGGSLKLSCAASGFTFNKYAMNWVRQAPGKGLEWVARIRSKYNNYATYYADSVKDRFTISRDDSKNTAYLQMNNLKTEDTAVYYCVRHGNFGNSYISYWAYWGQGTLVTVSSGGGGSGGGGSGGGGSQTVVTQEPSLTVSPGGTVTLTCGSSTGAVTSGNYPNWVQQKPGQAPRGLIGGTKFLAPGTPARFSGSLLGGKAALTLSGVQPEDEAEYYCVLWYSNRWVFGGGTKLTVL

SEQ ID NO: 129 - protein, 994 aa, synthetic construct
  REGION 1..994: note = Synthetic Peptide
QVQLVESGGGVVQSGRSLRLSCAASGFTFRNYGMHWVRQAPGKCLEWVAVIWYDGSDKYYADSVRGRFTISRDNSKNTLYLQMNSLRAEDTAVYYCARDGYDILTGNPRDFDYWGQGTLVTVSSGGGGSGGGGSGGGGSDTVMTQTPLSSHVTLGQPASISCRSSQSLVHSDGNTYLSWLQQRPGQPPRLLIYRISRRFSGVPDRFSGSGAGTDFTLEISRVEAEDVGVYYCMQSTHVPRTFGCGTKVEIKSGGGGSEVQLVESGGGLVQPGGSLKLSCAASGFTFNKYAMNWVRQAPGKGLEWVARIRSKYNNYATYYADSVKDRFTISRDDSKNTAYLQMNNLKTEDTAVYYCVRHGNFGNSYISYWAYWGQGTLVTVSSGGGGSGGGGSGGGGSQTVVTQEPSLTVSPGGTVTLTCGSSTGAVTSGNYPNWVQQKPGQAPRGLIGGTKFLAPGTPARFSGSLLGGKAALTLSGVQPEDEAEYYCVLWYSNRWVFGGGTKLTVLGGGGDKTHTCPPCPAPELLGGPSVFLFPPKPKDTLMISRTPEVTCVVVDVSHEDPEVKFNWYVDGVEVHNAKTKPCEEQYGSTYRCVSVLTVLHQDWLNGKEYKCKVSNKALPAPIEKTISKAKGQPREPQVYTLPPSREEMTKNQVSLTCLVKGFYPSDIAVEWESNGQPENNYKTTPPVLDSDGSFFLYSKLTVDKSRWQQGNVFSCSVMHEALHNHYTQKSLSLSPGKGGGGSGGGGSGGGGSGGGGSGGGGSGGGGSDKTHTCPPCPAPELLGGPSVFLFPPKPKDTLMISRTPEVTCVVVDVSHEDPEVKFNWYVDGVEVHNAKTKPCEEQYGSTYRCVSVLTVLHQDWLNGKEYKCKVSNKALPAPIEKTISKAKGQPREPQVYTLPPSREEMTKNQVSLTCLVKGFYPSDIAVEWESNGQPENNYKTTPPVLDSDGSFFLYSKLTVDKSRWQQGNVFSCSVMHEALHNHYTQKSLSLSPGK

SEQ ID NO: 130 - protein, 5 aa, synthetic construct
  REGION 1..5: note = Synthetic Peptide
DYYMT

SEQ ID NO: 131 - protein, 17 aa, synthetic construct
  REGION 1..17: note = Synthetic Peptide
YISSSGSTIYYADSVKG

SEQ ID NO: 132 - protein, 8 aa, synthetic construct
  REGION 1..8: note = Synthetic Peptide
DRNSHFDY

SEQ ID NO: 133 - protein, 11 aa, synthetic construct
  REGION 1..11: note = Synthetic Peptide
RASQGINTWLA

SEQ ID NO: 134 - protein, 7 aa, synthetic construct
  REGION 1..7: note = Synthetic Peptide
GASGLQS

SEQ ID NO: 135 - protein, 9 aa, synthetic construct
  REGION 1..9: note = Synthetic Peptide
QQAKSFPRT

SEQ ID NO: 136 - protein, 117 aa, synthetic construct
  REGION 1..117: note = Synthetic Peptide
QVQLVESGGGLVKPGGSLRLSCAASGFTFSDYYMTWIRQAPGKGLEWLSYISSSGSTIYYADSVKGRFTISRDNAKNSLFLQMNSLRAEDTAVYYCARDRNSHFDYWGQGTLVTVSS

SEQ ID NO: 137 - protein, 107 aa, synthetic construct
  REGION 1..107: note = Synthetic Peptide
DIQMTQSPSSVSASVGDRVTITCRASQGINTWLAWYQQKPGKAPKLLIYGASGLQSGVPSRFSGSGSGTDFTLTISSLQPEDFATYYCQQAKSFPRTFGQGTKVEIK

SEQ ID NO: 138 - protein, 239 aa, synthetic construct
  REGION 1..239: note = Synthetic Peptide
QVQLVESGGGLVKPGGSLRLSCAASGFTFSDYYMTWIRQAPGKGLEWLSYISSSGSTIYYADSVKGRFTISRDNAKNSLFLQMNSLRAEDTAVYYCARDRNSHFDYWGQGTLVTVSSGGGGSGGGGSGGGGSDIQMTQSPSSVSASVGDRVTITCRASQGINTWLAWYQQKPGKAPKLLIYGASGLQSGVPSRFSGSGSGTDFTLTISSLQPEDFATYYCQQAKSFPRTFGQGTKVEIK

SEQ ID NO: 139 - protein, 494 aa, synthetic construct
  REGION 1..494: note = Synthetic Peptide
QVQLVESGGGLVKPGGSLRLSCAASGFTFSDYYMTWIRQAPGKGLEWLSYISSSGSTIYYADSVKGRFTISRDNAKNSLFLQMNSLRAEDTAVYYCARDRNSHFDYWGQGTLVTVSSGGGGSGGGGSGGGGSDIQMTQSPSSVSASVGDRVTITCRASQGINTWLAWYQQKPGKAPKLLIYGASGLQSGVPSRFSGSGSGTDFTLTISSLQPEDFATYYCQQAKSFPRTFGQGTKVEIKSGGGGSEVQLVESGGGLVQPGGSLKLSCAASGFTFNKYAMNWVRQAPGKGLEWVARIRSKYNNYATYYADSVKDRFTISRDDSKNTAYLQMNNLKTEDTAVYYCVRHGNFGNSYISYWAYWGQGTLVTVSSGGGGSGGGGSGGGGSQTVVTQEPSLTVSPGGTVTLTCGSSTGAVTSGNYPNWVQQKPGQAPRGLIGGTKFLAPGTPARFSGSLLGGKAALTLSGVQPEDEAEYYCVLWYSNRWVFGGGTKLTVL

SEQ ID NO: 140 - protein, 982 aa, synthetic construct
  REGION 1..982: note = Synthetic Peptide
QVQLVESGGGLVKPGGSLRLSCAASGFTFSDYYMTWIRQAPGKGLEWLSYISSSGSTIYYADSVKGRFTISRDNAKNSLFLQMNSLRAEDTAVYYCARDRNSHFDYWGQGTLVTVSSGGGGSGGGGSGGGGSDIQMTQSPSSVSASVGDRVTITCRASQGINTWLAWYQQKPGKAPKLLIYGASGLQSGVPSRFSGSGSGTDFTLTISSLQPEDFATYYCQQAKSFPRTFGQGTKVEIKSGGGGSEVQLVESGGGLVQPGGSLKLSCAASGFTFNKYAMNWVRQAPGKGLEWVARIRSKYNNYATYYADSVKDRFTISRDDSKNTAYLQMNNLKTEDTAVYYCVRHGNFGNSYISYWAYWGQGTLVTVSSGGGGSGGGGSGGGGSQTVVTQEPSLTVSPGGTVTLTCGSSTGAVTSGNYPNWVQQKPGQAPRGLIGGTKFLAPGTPARFSGSLLGGKAALTLSGVQPEDEAEYYCVLWYSNRWVFGGGTKLTVLGGGGDKTHTCPPCPAPELLGGPSVFLFPPKPKDTLMISRTPEVTCVVVDVSHEDPEVKFNWYVDGVEVHNAKTKPCEEQYGSTYRCVSVLTVLHQDWLNGKEYKCKVSNKALPAPIEKTISKAKGQPREPQVYTLPPSREEMTKNQVSLTCLVKGFYPSDIAVEWESNGQPENNYKTTPPVLDSDGSFFLYSKLTVDKSRWQQGNVFSCSVMHEALHNHYTQKSLSLSPGKGGGGSGGGGSGGGGSGGGGSGGGGSGGGGSDKTHTCPPCPAPELLGGPSVFLFPPKPKDTLMISRTPEVTCVVVDVSHEDPEVKFNWYVDGVEVHNAKTKPCEEQYGSTYRCVSVLTVLHQDWLNGKEYKCKVSNKALPAPIEKTISKAKGQPREPQVYTLPPSREEMTKNQVSLTCLVKGFYPSDIAVEWESNGQPENNYKTTPPVLDSDGSFFLYSKLTVDKSRWQQGNVFSCSVMHEALHNHYTQKSLSLSPGK

SEQ ID NO: 141 - protein, 982 aa, synthetic construct
  REGION 1..982: note = Synthetic Peptide
QVQLVESGGGLVKPGGSLRLSCAASGFTFSDYYMTWIRQAPGKCLEWLSYISSSGSTIYYADSVKGRFTISRDNAKNSLFLQMNSLRAEDTAVYYCARDRNSHFDYWGQGTLVTVSSGGGGSGGGGSGGGGSDIQMTQSPSSVSASVGDRVTITCRASQGINTWLAWYQQKPGKAPKLLIYGASGLQSGVPSRFSGSGSGTDFTLTISSLQPEDFATYYCQQAKSFPRTFGCGTKVEIKSGGGGSEVQLVESGGGLVQPGGSLKLSCAASGFTFNKYAMNWVRQAPGKGLEWVARIRSKYNNYATYYADSVKDRFTISRDDSKNTAYLQMNNLKTEDTAVYYCVRHGNFGNSYISYWAYWGQGTLVTVSSGGGGSGGGGSGGGGSQTVVTQEPSLTVSPGGTVTLTCGSSTGAVTSGNYPNWVQQKPGQAPRGLIGGTKFLAPGTPARFSGSLLGGKAALTLSGVQPEDEAEYYCVLWYSNRWVFGGGTKLTVLGGGGDKTHTCPPCPAPELLGGPSVFLFPPKPKDTLMISRTPEVTCVVVDVSHEDPEVKFNWYVDGVEVHNAKTKPCEEQYGSTYRCVSVLTVLHQDWLNGKEYKCKVSNKALPAPIEKTISKAKGQPREPQVYTLPPSREEMTKNQVSLTCLVKGFYPSDIAVEWESNGQPENNYKTTPPVLDSDGSFFLYSKLTVDKSRWQQGNVFSCSVMHEALHNHYTQKSLSLSPGKGGGGSGGGGSGGGGSGGGGSGGGGSGGGGSDKTHTCPPCPAPELLGGPSVFLFPPKPKDTLMISRTPEVTCVVVDVSHEDPEVKFNWYVDGVEVHNAKTKPCEEQYGSTYRCVSVLTVLHQDWLNGKEYKCKVSNKALPAPIEKTISKAKGQPREPQVYTLPPSREEMTKNQVSLTCLVKGFYPSDIAVEWESNGQPENNYKTTPPVLDSDGSFFLYSKLTVDKSRWQQGNVFSCSVMHEALHNHYTQKSLSLSPGK

SEQ ID NO: 142 - protein, 5 aa, synthetic construct
  REGION 1..5: note = Synthetic Peptide
SYGMH

SEQ ID NO: 143 - protein, 17 aa, synthetic construct
  REGION 1..17: note = Synthetic Peptide
FIWYEGSNKYYAESVKD

SEQ ID NO: 144 - protein, 16 aa, synthetic construct
  REGION 1..16: note = Synthetic Peptide
RAGIIGTIGYYYGMDV

SEQ ID NO: 145 - protein, 11 aa, synthetic construct
  REGION 1..11: note = Synthetic Peptide
SGDRLGEKYTS

SEQ ID NO: 146 - protein, 7 aa, synthetic construct
  REGION 1..7: note = Synthetic Peptide
QDTKRPS

SEQ ID NO: 147 - protein, 9 aa, synthetic construct
  REGION 1..9: note = Synthetic Peptide
QAWESSTVV

SEQ ID NO: 148 - protein, 125 aa, synthetic construct
  REGION 1..125: note = Synthetic Peptide
QVQLVESGGGVVQPGGSLRLSCAASGFTFSSYGMHWVRQAPGKGLEWVAFIWYEGSNKYYAESVKDRFTISRDNSKNTLYLQMNSLRAEDTAVYYCARRAGIIGTIGYYYGMDVWGQGTTVTVSS

SEQ ID NO: 149 - protein, 125 aa, synthetic construct
  REGION 1..125: note = Synthetic Peptide
QVQLVESGGGVVQPGGSLRLSCAASGFTFSSYGMHWVRQAPGKCLEWVAFIWYEGSNKYYAESVKDRFTISRDNSKNTLYLQMNSLRAEDTAVYYCARRAGIIGTIGYYYGMDVWGQGTTVTVSS

SEQ ID NO: 150 - protein, 107 aa, synthetic construct
  REGION 1..107: note = Synthetic Peptide
SYELTQPPSVSVSPGQTASITCSGDRLGEKYTSWYQQRPGQSPLLVIYQDTKRPSGIPERFSGSNSGNTATLTISGTQAMDEADYYCQAWESSTVVFGGGTKLTVLS

SEQ ID NO: 151 - protein, 106 aa, synthetic construct
  REGION 1..106: note = Synthetic Peptide
SYELTQPPSVSVSPGQTASITCSGDRLGEKYTSWYQQRPGQSPLLVIYQDTKRPSGIPERFSGSNSGNTATLTISGTQAMDEADYYCQAWESSTVVFGCGTKLTVL

SEQ ID NO: 152 - protein, 247 aa, synthetic construct
  REGION 1..247: note = Synthetic Peptide
QVQLVESGGGVVQPGGSLRLSCAASGFTFSSYGMHWVRQAPGKGLEWVAFIWYEGSNKYYAESVKDRFTISRDNSKNTLYLQMNSLRAEDTAVYYCARRAGIIGTIGYYYGMDVWGQGTTVTVSSGGGGSGGGGSGGGGSSYELTQPPSVSVSPGQTASITCSGDRLGEKYTSWYQQRPGQSPLLVIYQDTKRPSGIPERFSGSNSGNTATLTISGTQAMDEADYYCQAWESSTVVFGGGTKLTVLS

SEQ ID NO: 153 - protein, 246 aa, synthetic construct
  REGION 1..246: note = Synthetic Peptide
QVQLVESGGGVVQPGGSLRLSCAASGFTFSSYGMHWVRQAPGKCLEWVAFIWYEGSNKYYAESVKDRFTISRDNSKNTLYLQMNSLRAEDTAVYYCARRAGIIGTIGYYYGMDVWGQGTTVTVSSGGGGSGGGGSGGGGSSYELTQPPSVSVSPGQTASITCSGDRLGEKYTSWYQQRPGQSPLLVIYQDTKRPSGIPERFSGSNSGNTATLTISGTQAMDEADYYCQAWESSTVVFGCGTKLTVL

SEQ ID NO: 154 - protein, 507 aa, synthetic construct
  REGION 1..507: note = Synthetic Peptide
QVQLVESGGGVVQPGGSLRLSCAASGFTFSSYGMHWVRQAPGKGLEWVAFIWYEGSNKYYAESVKDRFTISRDNSKNTLYLQMNSLRAEDTAVYYCARRAGIIGTIGYYYGMDVWGQGTTVTVSSGGGGSGGGGSGGGGSSYELTQPPSVSVSPGQTASITCSGDRLGEKYTSWYQQRPGQSPLLVIYQDTKRPSGIPERFSGSNSGNTATLTISGTQAMDEADYYCQAWESSTVVFGGGTKLTVLSGGGGSEVQLVESGGGLVQPGGSLKLSCAASGFTFNKYAMNWVRQAPGKGLEWVARIRSKYNNYATYYADSVKDRFTISRDDSKNTAYLQMNNLKTEDTAVYYCVRHGNFGNSYISYWAYWGQGTLVTVSSGGGGSGGGGSGGGGSQTVVTQEPSLTVSPGGTVTLTCGSSTGAVTSGNYPNWVQQKPGQAPRGLIGGTKFLAPGTPARFSGSLLGGKAALTLSGVQPEDEAEYYCVLWYSNRWVFGGGTKLTVLHHHHHH

SEQ ID NO: 155 - protein, 501 aa, synthetic construct
  REGION 1..501: note = Synthetic Peptide
QVQLVESGGGVVQPGGSLRLSCAASGFTFSSYGMHWVRQAPGKCLEWVAFIWYEGSNKYYAESVKDRFTISRDNSKNTLYLQMNSLRAEDTAVYYCARRAGIIGTIGYYYGMDVWGQGTTVTVSSGGGGSGGGGSGGGGSSYELTQPPSVSVSPGQTASITCSGDRLGEKYTSWYQQRPGQSPLLVIYQDTKRPSGIPERFSGSNSGNTATLTISGTQAMDEADYYCQAWESSTVVFGCGTKLTVLSGGGGSEVQLVESGGGLVQPGGSLKLSCAASGFTFNKYAMNWVRQAPGKGLEWVARIRSKYNNYATYYADSVKDRFTISRDDSKNTAYLQMNNLKTEDTAVYYCVRHGNFGNSYISYWAYWGQGTLVTVSSGGGGSGGGGSGGGGSQTVVTQEPSLTVSPGGTVTLTCGSSTGAVTSGNYPNWVQQKPGQAPRGLIGGTKFLAPGTPARFSGSLLGGKAALTLSGVQPEDEAEYYCVLWYSNRWVFGGGTKLTVL

SEQ ID NO: 156 - protein, 989 aa, synthetic construct
  REGION 1..989: note = Synthetic Peptide
QVQLVESGGGVVQPGGSLRLSCAASGFTFSSYGMHWVRQAPGKGLEWVAFIWYEGSNKYYAESVKDRFTISRDNSKNTLYLQMNSLRAEDTAVYYCARRAGIIGTIGYYYGMDVWGQGTTVTVSSGGGGSGGGGSGGGGSSYELTQPPSVSVSPGQTASITCSGDRLGEKYTSWYQQRPGQSPLLVIYQDTKRPSGIPERFSGSNSGNTATLTISGTQAMDEADYYCQAWESSTVVFGGGTKLTVLSGGGGSEVQLVESGGGLVQPGGSLKLSCAASGFTFNKYAMNWVRQAPGKGLEWVARIRSKYNNYATYYADSVKDRFTISRDDSKNTAYLQMNNLKTEDTAVYYCVRHGNFGNSYISYWAYWGQGTLVTVSSGGGGSGGGGSGGGGSQTVVTQEPSLTVSPGGTVTLTCGSSTGAVTSGNYPNWVQQKPGQAPRGLIGGTKFLAPGTPARFSGSLLGGKAALTLSGVQPEDEAEYYCVLWYSNRWVFGGGTKLTVLGGGGDKTHTCPPCPAPELLGGPSVFLFPPKPKDTLMISRTPEVTCVVVDVSHEDPEVKFNWYVDGVEVHNAKTKPCEEQYGSTYRCVSVLTVLHQDWLNGKEYKCKVSNKALPAPIEKTISKAKGQPREPQVYTLPPSREEMTKNQVSLTCLVKGFYPSDIAVEWESNGQPENNYKTTPPVLDSDGSFFLYSKLTVDKSRWQQGNVFSCSVMHEALHNHYTQKSLSLSPGKGGGGSGGGGSGGGGSGGGGSGGGGSGGGGSDKTHTCPPCPAPELLGGPSVFLFPPKPKDTLMISRTPEVTCVVVDVSHEDPEVKFNWYVDGVEVHNAKTKPCEEQYGSTYRCVSVLTVLHQDWLNGKEYKCKVSNKALPAPIEKTISKAKGQPREPQVYTLPPSREEMTKNQVSLTCLVKGFYPSDIAVEWESNGQPENNYKTTPPVLDSDGSFFLYSKLTVDKSRWQQGNVFSCSVMHEALHNHYTQKSLSLSPGK

SEQ ID NO: 157 - protein, 987 aa, synthetic construct
  REGION 1..987: note = Synthetic Peptide
QVQLVESGGGVVQPGGSLRLSCAASGFTFSSYGMHWVRQAPGKGLEWVAFIWYEGSNKYYAESVKDRFTISRDNSKNTLYLQMNSLRAEDTAVYYCARRAGIIGTIGYYYGMDVWGQGTTVTVSSGGGGSGGGGSGGGGSSYELTQPPSVSVSPGQTASITCSGDRLGEKYTSWYQQRPGQSPLLVIYQDTKRPSGIPERFSGSNSGNTATLTISGTQAMDEADYYCQAWESSTVVFGGGTKLTVLSGGGGSEVQLVESGGGLVQPGGSLKLSCAASGFTFNKYAMNWVRQAPGKGLEWVARIRSKYNNYATYYADSVKDRFTISRDDSKNTAYLQMNNLKTEDTAVYYCVRHGNFGNSYISYWAYWGQGTLVTVSSGGGGSGGGGSGGGGSQTVVTQEPSLTVSPGGTVTLTCGSSTGAVTSGNYPNWVQQKPGQAPRGLIGGTKFLAPGTPARFSGSLLGGKAALTLSGVQPEDEAEYYCVLWYSNRWVFGGGTKLTVLGGGGDKTHTCPPCPAPELLGGPSVFLFPPKPKDTLMISRTPEVTCVVVDVSHEDPEVKFNWYVDGVEVHNAKTKPCEEQYGSTYRCVSVLTVLHQDWLNGKEYKCKVSNKALPAPIEKTISKAKGQPREPQVYTLPPSREEMTKNQVSLTCLVKGFYPSDIAVEWESNGQPENNYKTTPPVLDSDGSFFLYSKLTVDKSRWQQGNVFSCSVMHEALHNHYTQKSLSLSPGGGGSGGGGSGGGGSGGGGSGGGGSGGGGSDKTHTCPPCPAPELLGGPSVFLFPPKPKDTLMISRTPEVTCVVVDVSHEDPEVKFNWYVDGVEVHNAKTKPCEEQYGSTYRCVSVLTVLHQDWLNGKEYKCKVSNKALPAPIEKTISKAKGQPREPQVYTLPPSREEMTKNQVSLTCLVKGFYPSDIAVEWESNGQPENNYKTTPPVLDSDGSFFLYSKLTVDKSRWQQGNVFSCSVMHEALHNHYTQKSLSLSPGK

SEQ ID NO: 158 - protein, 989 aa, synthetic construct
  REGION 1..989: note = Synthetic Peptide
QVQLVESGGGVVQPGGSLRLSCAASGFTFSSYGMHWVRQAPGKCLEWVAFIWYEGSNKYYAESVKDRFTISRDNSKNTLYLQMNSLRAEDTAVYYCARRAGIIGTIGYYYGMDVWGQGTTVTVSSGGGGSGGGGSGGGGSSYELTQPPSVSVSPGQTASITCSGDRLGEKYTSWYQQRPGQSPLLVIYQDTKRPSGIPERFSGSNSGNTATLTISGTQAMDEADYYCQAWESSTVVFGCGTKLTVLSGGGGSEVQLVESGGGLVQPGGSLKLSCAASGFTFNKYAMNWVRQAPGKGLEWVARIRSKYNNYATYYADSVKDRFTISRDDSKNTAYLQMNNLKTEDTAVYYCVRHGNFGNSYISYWAYWGQGTLVTVSSGGGGSGGGGSGGGGSQTVVTQEPSLTVSPGGTVTLTCGSSTGAVTSGNYPNWVQQKPGQAPRGLIGGTKFLAPGTPARFSGSLLGGKAALTLSGVQPEDEAEYYCVLWYSNRWVFGGGTKLTVLGGGGDKTHTCPPCPAPELLGGPSVFLFPPKPKDTLMISRTPEVTCVVVDVSHEDPEVKFNWYVDGVEVHNAKTKPCEEQYGSTYRCVSVLTVLHQDWLNGKEYKCKVSNKALPAPIEKTISKAKGQPREPQVYTLPPSREEMTKNQVSLTCLVKGFYPSDIAVEWESNGQPENNYKTTPPVLDSDGSFFLYSKLTVDKSRWQQGNVFSCSVMHEALHNHYTQKSLSLSPGKGGGGSGGGGSGGGGSGGGGSGGGGSGGGGSDKTHTCPPCPAPELLGGPSVFLFPPKPKDTLMISRTPEVTCVVVDVSHEDPEVKFNWYVDGVEVHNAKTKPCEEQYGSTYRCVSVLTVLHQDWLNGKEYKCKVSNKALPAPIEKTISKAKGQPREPQVYTLPPSREEMTKNQVSLTCLVKGFYPSDIAVEWESNGQPENNYKTTPPVLDSDGSFFLYSKLTVDKSRWQQGNVFSCSVMHEALHNHYTQKSLSLSPGK

SEQ ID NO: 159 - protein, 987 aa, synthetic construct
  REGION 1..987: note = Synthetic Peptide
QVQLVESGGGVVQPGGSLRLSCAASGFTFSSYGMHWVRQAPGKCLEWVAFIWYEGSNKYYAESVKDRFTISRDNSKNTLYLQMNSLRAEDTAVYYCARRAGIIGTIGYYYGMDVWGQGTTVTVSSGGGGSGGGGSGGGGSSYELTQPPSVSVSPGQTASITCSGDRLGEKYTSWYQQRPGQSPLLVIYQDTKRPSGIPERFSGSNSGNTATLTISGTQAMDEADYYCQAWESSTVVFGCGTKLTVLSGGGGSEVQLVESGGGLVQPGGSLKLSCAASGFTFNKYAMNWVRQAPGKGLEWVARIRSKYNNYATYYADSVKDRFTISRDDSKNTAYLQMNNLKTEDTAVYYCVRHGNFGNSYISYWAYWGQGTLVTVSSGGGGSGGGGSGGGGSQTVVTQEPSLTVSPGGTVTLTCGSSTGAVTSGNYPNWVQQKPGQAPRGLIGGTKFLAPGTPARFSGSLLGGKAALTLSGVQPEDEAEYYCVLWYSNRWVFGGGTKLTVLGGGGDKTHTCPPCPAPELLGGPSVFLFPPKPKDTLMISRTPEVTCVVVDVSHEDPEVKFNWYVDGVEVHNAKTKPCEEQYGSTYRCVSVLTVLHQDWLNGKEYKCKVSNKALPAPIEKTISKAKGQPREPQVYTLPPSREEMTKNQVSLTCLVKGFYPSDIAVEWESNGQPENNYKTTPPVLDSDGSFFLYSKLTVDKSRWQQGNVFSCSVMHEALHNHYTQKSLSLSPGGGGSGGGGSGGGGSGGGGSGGGGSGGGGSDKTHTCPPCPAPELLGGPSVFLFPPKPKDTLMISRTPEVTCVVVDVSHEDPEVKFNWYVDGVEVHNAKTKPCEEQYGSTYRCVSVLTVLHQDWLNGKEYKCKVSNKALPAPIEKTISKAKGQPREPQVYTLPPSREEMTKNQVSLTCLVKGFYPSDIAVEWESNGQPENNYKTTPPVLDSDGSFFLYSKLTVDKSRWQQGNVFSCSVMHEALHNHYTQKSLSLSPGK

SEQ ID NO: 160 - protein, 7 aa, synthetic construct
  REGION 1..7: note = Synthetic Peptide
NARMGVS

SEQ ID NO: 161 - protein, 16 aa, synthetic construct
  REGION 1..16: note = Synthetic Peptide
HIFSNDEKSYSTSLKN

SEQ ID NO: 162 - protein, 14 aa, synthetic construct
  REGION 1..14: note = Synthetic Peptide
IVGYGSGWYGFFDY

SEQ ID NO: 163 - protein, 11 aa, synthetic construct
  REGION 1..11: note = Synthetic Peptide
RASQGIRNDLG

SEQ ID NO: 164 - protein, 7 aa, synthetic construct
  REGION 1..7: note = Synthetic Peptide
AASTLQS

SEQ ID NO: 165 - protein, 9 aa, synthetic construct
  REGION 1..9: note = Synthetic Peptide
LQHNSYPLT

SEQ ID NO: 166 - protein, 124 aa, synthetic construct
  REGION 1..124: note = Synthetic Peptide
QVTLKESGPTLVKPTETLTLTCTLSGFSLNNARMGVSWIRQPPGKCLEWLAHIFSNDEKSYSTSLKNRLTISKDSSKTQVVLTMTNVDPVDTATYYCARIVGYGSGWYGFFDYWGQGTLVTVSS

SEQ ID NO: 167 - protein, 107 aa, synthetic construct
  REGION 1..107: note = Synthetic Peptide
DIQMTQSPSSLSASVGDRVTITCRASQGIRNDLGWYQQKPGKAPKRLIYAASTLQSGVPSRFSGSGSGTEFTLTISSLQPEDFATYYCLQHNSYPLTFGCGTKVEIK

SEQ ID NO: 168 - protein, 246 aa, synthetic construct
  REGION 1..246: note = Synthetic Peptide
QVTLKESGPTLVKPTETLTLTCTLSGFSLNNARMGVSWIRQPPGKCLEWLAHIFSNDEKSYSTSLKNRLTISKDSSKTQVVLTMTNVDPVDTATYYCARIVGYGSGWYGFFDYWGQGTLVTVSSGGGGSGGGGSGGGGSDIQMTQSPSSLSASVGDRVTITCRASQGIRNDLGWYQQKPGKAPKRLIYAASTLQSGVPSRFSGSGSGTEFTLTISSLQPEDFATYYCLQHNSYPLTFGCGTKVEIK

SEQ ID NO: 169 - protein, 501 aa, synthetic construct
  REGION 1..501: note = Synthetic Peptide
QVTLKESGPTLVKPTETLTLTCTLSGFSLNNARMGVSWIRQPPGKCLEWLAHIFSNDEKSYSTSLKNRLTISKDSSKTQVVLTMTNVDPVDTATYYCARIVGYGSGWYGFFDYWGQGTLVTVSSGGGGSGGGGSGGGGSDIQMTQSPSSLSASVGDRVTITCRASQGIRNDLGWYQQKPGKAPKRLIYAASTLQSGVPSRFSGSGSGTEFTLTISSLQPEDFATYYCLQHNSYPLTFGCGTKVEIKSGGGGSEVQLVESGGGLVQPGGSLKLSCAASGFTFNKYAMNWVRQAPGKGLEWVARIRSKYNNYATYYADSVKDRFTISRDDSKNTAYLQMNNLKTEDTAVYYCVRHGNFGNSYISYWAYWGQGTLVTVSSGGGGSGGGGSGGGGSQTVVTQEPSLTVSPGGTVTLTCGSSTGAVTSGNYPNWVQQKPGQAPRGLIGGTKFLAPGTPARFSGSLLGGKAALTLSGVQPEDEAEYYCVLWYSNRWVFGGGTKLTVL

SEQ ID NO: 170 - protein, 989 aa, synthetic construct
  REGION 1..989: note = Synthetic Peptide
QVTLKESGPTLVKPTETLTLTCTLSGFSLNNARMGVSWIRQPPGKCLEWLAHIFSNDEKSYSTSLKNRLTISKDSSKTQVVLTMTNVDPVDTATYYCARIVGYGSGWYGFFDYWGQGTLVTVSSGGGGSGGGGSGGGGSDIQMTQSPSSLSASVGDRVTITCRASQGIRNDLGWYQQKPGKAPKRLIYAASTLQSGVPSRFSGSGSGTEFTLTISSLQPEDFATYYCLQHNSYPLTFGCGTKVEIKSGGGGSEVQLVESGGGLVQPGGSLKLSCAASGFTFNKYAMNWVRQAPGKGLEWVARIRSKYNNYATYYADSVKDRFTISRDDSKNTAYLQMNNLKTEDTAVYYCVRHGNFGNSYISYWAYWGQGTLVTVSSGGGGSGGGGSGGGGSQTVVTQEPSLTVSPGGTVTLTCGSSTGAVTSGNYPNWVQQKPGQAPRGLIGGTKFLAPGTPARFSGSLLGGKAALTLSGVQPEDEAEYYCVLWYSNRWVFGGGTKLTVLGGGGDKTHTCPPCPAPELLGGPSVFLFPPKPKDTLMISRTPEVTCVVVDVSHEDPEVKFNWYVDGVEVHNAKTKPCEEQYGSTYRCVSVLTVLHQDWLNGKEYKCKVSNKALPAPIEKTISKAKGQPREPQVYTLPPSREEMTKNQVSLTCLVKGFYPSDIAVEWESNGQPENNYKTTPPVLDSDGSFFLYSKLTVDKSRWQQGNVFSCSVMHEALHNHYTQKSLSLSPGKGGGGSGGGGSGGGGSGGGGSGGGGSGGGGSDKTHTCPPCPAPELLGGPSVFLFPPKPKDTLMISRTPEVTCVVVDVSHEDPEVKFNWYVDGVEVHNAKTKPCEEQYGSTYRCVSVLTVLHQDWLNGKEYKCKVSNKALPAPIEKTISKAKGQPREPQVYTLPPSREEMTKNQVSLTCLVKGFYPSDIAVEWESNGQPENNYKTTPPVLDSDGSFFLYSKLTVDKSRWQQGNVFSCSVMHEALHNHYTQKSLSLSPGK

SEQ ID NO: 171 - protein, 5 aa, synthetic construct
  REGION 1..5: note = Synthetic Peptide
SYYWS

SEQ ID NO: 172 - protein, 16 aa, synthetic construct
  REGION 1..16: note = Synthetic Peptide
YVYYSGTTNYNPSLKS

SEQ ID NO: 173 - protein, 10 aa, synthetic construct
  REGION 1..10: note = Synthetic Peptide
IAVTGFYFDY

SEQ ID NO: 174 - protein, 12 aa, synthetic construct
  REGION 1..12: note = Synthetic Peptide
RASQRVNNNYLA

SEQ ID NO: 175 - protein, 7 aa, synthetic construct
  REGION 1..7: note = Synthetic Peptide
GASSRAT

SEQ ID NO: 176 - protein, 9 aa, synthetic construct
  REGION 1..9: note = Synthetic Peptide
QQYDRSPLT

SEQ ID NO: 177 - protein, 118 aa, synthetic construct
  REGION 1..118: note = Synthetic Peptide
QVQLQESGPGLVKPSETLSLTCTVSGGSISSYYWSWIRQPPGKCLEWIGYVYYSGTTNYNPSLKSRVTISVDTSKNQFSLKLSSVTAADTAVYYCASIAVTGFYFDYWGQGTLVTVSS

SEQ ID NO: 178 - protein, 108 aa, synthetic construct
  REGION 1..108: note = Synthetic Peptide
EIVLTQSPGTLSLSPGERVTLSCRASQRVNNNYLAWYQQRPGQAPRLLIYGASSRATGIPDRFSGSGSGTDFTLTISRLEPEDFAVYYCQQYDRSPLTFGCGTKLEIK

SEQ ID NO: 179 - protein, 241 aa, synthetic construct
  REGION 1..241: note = Synthetic Peptide
QVQLQESGPGLVKPSETLSLTCTVSGGSISSYYWSWIRQPPGKCLEWIGYVYYSGTTNYNPSLKSRVTISVDTSKNQFSLKLSSVTAADTAVYYCASIAVTGFYFDYWGQGTLVTVSSGGGGSGGGGSGGGGSEIVLTQSPGTLSLSPGERVTLSCRASQRVNNNYLAWYQQRPGQAPRLLIYGASSRATGIPDRFSGSGSGTDFTLTISRLEPEDFAVYYCQQYDRSPLTFGCGTKLEIK

SEQ ID NO: 180 - protein, 496 aa, synthetic construct
  REGION 1..496: note = Synthetic Peptide
QVQLQESGPGLVKPSETLSLTCTVSGGSISSYYWSWIRQPPGKCLEWIGYVYYSGTTNYNPSLKSRVTISVDTSKNQFSLKLSSVTAADTAVYYCASIAVTGFYFDYWGQGTLVTVSSGGGGSGGGGSGGGGSEIVLTQSPGTLSLSPGERVTLSCRASQRVNNNYLAWYQQRPGQAPRLLIYGASSRATGIPDRFSGSGSGTDFTLTISRLEPEDFAVYYCQQYDRSPLTFGCGTKLEIKSGGGGSEVQLVESGGGLVQPGGSLKLSCAASGFTFNKYAMNWVRQAPGKGLEWVARIRSKYNNYATYYADSVKDRFTISRDDSKNTAYLQMNNLKTEDTAVYYCVRHGNFGNSYISYWAYWGQGTLVTVSSGGGGSGGGGSGGGGSQTVVTQEPSLTVSPGGTVTLTCGSSTGAVTSGNYPNWVQQKPGQAPRGLIGGTKFLAPGTPARFSGSLLGGKAALTLSGVQPEDEAEYYCVLWYSNRWVFGGGTKLTVL

SEQ ID NO: 181 - protein, 982 aa, synthetic construct
  REGION 1..982: note = Synthetic Peptide
QVQLQESGPGLVKPSETLSLTCTVSGGSISSYYWSWIRQPPGKCLEWIGYVYYSGTTNYNPSLKSRVTISVDTSKNQFSLKLSSVTAADTAVYYCASIAVTGFYFDYWGQGTLVTVSSGGGGSGGGGSGGGGSEIVLTQSPGTLSLSPGERVTLSCRASQRVNNNYLAWYQQRPGQAPRLLIYGASSRATGIPDRFSGSGSGTDFTLTISRLEPEDFAVYYCQQYDRSPLTFGCGTKLEIKSGGGGSEVQLVESGGGLVQPGGSLKLSCAASGFTFNKYAMNWVRQAPGKGLEWVARIRSKYNNYATYYADSVKDRFTISRDDSKNTAYLQMNNLKTEDTAVYYCVRHGNFGNSYISYWAYWGQGTLVTVSSGGGGSGGGGSGGGGSQTVVTQEPSLTVSPGGTVTLTCGSSTGAVTSGNYPNWVQQKPGQAPRGLIGGTKFLAPGTPARFSGSLLGGKAALTLSGVQPEDEAEYYCVLWYSNRWVFGGGTKLTVLGGGGDKTHTCPPCPAPELLGGPSVFLFPPKPKDTLMISRTPEVTCVVVDVSHEDPEVKFNWYVDGVEVHNAKTKPCEEQYGSTYRCVSVLTVLHQDWLNGKEYKCKVSNKALPAPIEKTISKAKGQPREPQVYTLPPSREEMTKNQVSLTCLVKGFYPSDIAVEWESNGQPENNYKTTPPVLDSDGSFFLYSKLTVDKSRWQQGNVFSCSVMHEALHNHYTQKSLSLSPGGGGSGGGGSGGGGSGGGGSGGGGSGGGGSDKTHTCPPCPAPELLGGPSVFLFPPKPKDTLMISRTPEVTCVVVDVSHEDPEVKFNWYVDGVEVHNAKTKPCEEQYGSTYRCVSVLTVLHQDWLNGKEYKCKVSNKALPAPIEKTISKAKGQPREPQVYTLPPSREEMTKNQVSLTCLVKGFYPSDIAVEWESNGQPENNYKTTPPVLDSDGSFFLYSKLTVDKSRWQQGNVFSCSVMHEALHNHYTQKSLSLSPGK

SEQ ID NO: 182 - protein, 5 aa, synthetic construct
  REGION 1..5: note = Synthetic Peptide
SYGMH

SEQ ID NO: 183 - protein, 17 aa, synthetic construct
  REGION 1..17: note = Synthetic Peptide
VISYEGSNKYYAESVKG

SEQ ID NO: 184 - protein, 13 aa, synthetic construct
  REGION 1..13: note = Synthetic Peptide
DRGTIFGNYGLEV

SEQ ID NO: 185 - protein, 16 aa, synthetic construct
  REGION 1..16: note = Synthetic Peptide
RSSQSLLHKNAFNYLD

SEQ ID NO: 186 - protein, 7 aa, synthetic construct
  REGION 1..7: note = Synthetic Peptide
LGSNRAS

SEQ ID NO: 187 - protein, 18 aa, synthetic construct
  REGION 1..18: note = Synthetic Peptide
MQALQTPFTMQALQTPFT

SEQ ID NO: 188 - protein, 122 aa, synthetic construct
  REGION 1..122: note = Synthetic Peptide
QVQLVESGGGVVQPGRSLRLSCAASGFTFSSYGMHWVRQAPGKCLEWVAVISYEGSNKYYAESVKGRFTISRDNSKNTLYLQMNSLRDEDTAVYYCARDRGTIFGNYGLEVWGQGTTVTVSS

SEQ ID NO: 189 - protein, 112 aa, synthetic construct
  REGION 1..112: note = Synthetic Peptide
DIVMTQSPLSLPVISGEPASISCRSSQSLLHKNAFNYLDWYLQKPGQSPQLLIYLGSNRASGVPDRFSGSGSGTDFTLKISRVEAEDVGVYYCMQALQTPFTFGCGTKVDIK

SEQ ID NO: 190 - protein, 503 aa, synthetic construct
  REGION 1..503: note = Synthetic Peptide
DIVMTQSPLSLPVISGEPASISCRSSQSLLHKNAFNYLDWYLQKPGQSPQLLIYLGSNRASGVPDRFSGSGSGTDFTLKISRVEAEDVGVYYCMQALQTPFTFGCGTKVDIKGGGGSGGGGSGGGGSQVQLVESGGGVVQPGRSLRLSCAASGFTFSSYGMHWVRQAPGKCLEWVAVISYEGSNKYYAESVKGRFTISRDNSKNTLYLQMNSLRDEDTAVYYCARDRGTIFGNYGLEVWGQGTTVTVSSGGGGSEVQLVESGGGLVQPGGSLKLSCAASGFTFNKYAMNWVRQAPGKGLEWVARIRSKYNNYATYYADSVKDRFTISRDDSKNTAYLQMNNLKTEDTAVYYCVRHGNFGNSYISYWAYWGQGTLVTVSSGGGGSGGGGSGGGGSQTVVTQEPSLTVSPGGTVTLTCGSSTGAVTSGNYPNWVQQKPGQAPRGLIGGTKFLAPGTPARFSGSLLGGKAALTLSGVQPEDEAEYYCVLWYSNRWVFGGGTKLTVL

SEQ ID NO: 191 - protein, 991 aa, synthetic construct
  REGION 1..991: note = Synthetic Peptide
DIVMTQSPLSLPVISGEPASISCRSSQSLLHKNAFNYLDWYLQKPGQSPQLLIYLGSNRASGVPDRFSGSGSGTDFTLKISRVEAEDVGVYYCMQALQTPFTFGCGTKVDIKGGGGSGGGGSGGGGSQVQLVESGGGVVQPGRSLRLSCAASGFTFSSYGMHWVRQAPGKCLEWVAVISYEGSNKYYAESVKGRFTISRDNSKNTLYLQMNSLRDEDTAVYYCARDRGTIFGNYGLEVWGQGTTVTVSSGGGGSEVQLVESGGGLVQPGGSLKLSCAASGFTFNKYAMNWVRQAPGKGLEWVARIRSKYNNYATYYADSVKDRFTISRDDSKNTAYLQMNNLKTEDTAVYYCVRHGNFGNSYISYWAYWGQGTLVTVSSGGGGSGGGGSGGGGSQTVVTQEPSLTVSPGGTVTLTCGSSTGAVTSGNYPNWVQQKPGQAPRGLIGGTKFLAPGTPARFSGSLLGGKAALTLSGVQPEDEAEYYCVLWYSNRWVFGGGTKLTVLGGGGDKTHTCPPCPAPELLGGPSVFLFPPKPKDTLMISRTPEVTCVVVDVSHEDPEVKFNWYVDGVEVHNAKTKPCEEQYGSTYRCVSVLTVLHQDWLNGKEYKCKVSNKALPAPIEKTISKAKGQPREPQVYTLPPSREEMTKNQVSLTCLVKGFYPSDIAVEWESNGQPENNYKTTPPVLDSDGSFFLYSKLTVDKSRWQQGNVFSCSVMHEALHNHYTQKSLSLSPGKGGGGSGGGGSGGGGSGGGGSGGGGSGGGGSDKTHTCPPCPAPELLGGPSVFLFPPKPKDTLMISRTPEVTCVVVDVSHEDPEVKFNWYVDGVEVHNAKTKPCEEQYGSTYRCVSVLTVLHQDWLNGKEYKCKVSNKALPAPIEKTISKAKGQPREPQVYTLPPSREEMTKNQVSLTCLVKGFYPSDIAVEWESNGQPENNYKTTPPVLDSDGSFFLYSKLTVDKSRWQQGNVFSCSVMHEALHNHYTQKSLSLSPGK

SEQ ID NO: 192 - protein, 5 aa, synthetic construct
  REGION 1..5: note = Synthetic Peptide
NHIIH

SEQ ID NO: 193 - protein, 17 aa, synthetic construct
  REGION 1..17: note = Synthetic Peptide
YINPYPGYHAYNEKFQG

SEQ ID NO: 194 - protein, 12 aa, synthetic construct
  REGION 1..12: note = Synthetic Peptide
DGYYRDTDVLDY

SEQ ID NO: 195 - protein, 11 aa, synthetic construct
  REGION 1..11: note = Synthetic Peptide
QASQDISNYLN

SEQ ID NO: 196 - protein, 7 aa, synthetic construct
  REGION 1..7: note = Synthetic Peptide
YTSRLHT

SEQ ID NO: 197 - protein, 7 aa, synthetic construct
  REGION 1..7: note = Synthetic Peptide
YTSRLHT

SEQ ID NO: 198 - protein, 121 aa, synthetic construct
  REGION 1..121: note = Synthetic Peptide
QVQLVQSGAEVKKPGASVKVSCKASGYTFTNHIIHWVRQAPGQCLEWMGYINPYPGYHAYNEKFQGRATMTSDTSTSTVYMELSSLRSEDTAVYYCARDGYYRDTDVLDYWGQGTLVTVSS

SEQ ID NO: 199 - protein, 107 aa, synthetic construct
  REGION 1..107: note = Synthetic Peptide
DIQMTQSPSSLSASVGDRVTITCQASQDISNYLNWYQQKPGKAPKLLIYYTSRLHTGVPSRFSGSGSGTDFTFTISSLEPEDIATYYCQQGNTLPWTFGCGTKLEIK

SEQ ID NO: 200 - protein, 243 aa, synthetic construct
  REGION 1..243: note = Synthetic Peptide
QVQLVQSGAEVKKPGASVKVSCKASGYTFTNHIIHWVRQAPGQCLEWMGYINPYPGYHAYNEKFQGRATMTSDTSTSTVYMELSSLRSEDTAVYYCARDGYYRDTDVLDYWGQGTLVTVSSGGGGSGGGGSGGGGSDIQMTQSPSSLSASVGDRVTITCQASQDISNYLNWYQQKPGKAPKLLIYYTSRLHTGVPSRFSGSGSGTDFTFTISSLEPEDIATYYCQQGNTLPWTFGCGTKLEIK

SEQ ID NO: 201 - protein, 986 aa, synthetic construct
  REGION 1..986: note = Synthetic Peptide
QVQLVQSGAEVKKPGASVKVSCKASGYTFTNHIIHWVRQAPGQCLEWMGYINPYPGYHAYNEKFQGRATMTSDTSTSTVYMELSSLRSEDTAVYYCARDGYYRDTDVLDYWGQGTLVTVSSGGGGSGGGGSGGGGSDIQMTQSPSSLSASVGDRVTITCQASQDISNYLNWYQQKPGKAPKLLIYYTSRLHTGVPSRFSGSGSGTDFTFTISSLEPEDIATYYCQQGNTLPWTFGCGTKLEIKSGGGGSEVQLVESGGGLVQPGGSLKLSCAASGFTFNKYAMNWVRQAPGKGLEWVARIRSKYNNYATYYADSVKDRFTISRDDSKNTAYLQMNNLKTEDTAVYYCVRHGNFGNSYISYWAYWGQGTLVTVSSGGGGSGGGGSGGGGSQTVVTQEPSLTVSPGGTVTLTCGSSTGAVTSGNYPNWVQQKPGQAPRGLIGGTKFLAPGTPARFSGSLLGGKAALTLSGVQPEDEAEYYCVLWYSNRWVFGGGTKLTVLGGGGDKTHTCPPCPAPELLGGPSVFLFPPKPKDTLMISRTPEVTCVVVDVSHEDPEVKFNWYVDGVEVHNAKTKPCEEQYGSTYRCVSVLTVLHQDWLNGKEYKCKVSNKALPAPIEKTISKAKGQPREPQVYTLPPSREEMTKNQVSLTCLVKGFYPSDIAVEWESNGQPENNYKTTPPVLDSDGSFFLYSKLTVDKSRWQQGNVFSCSVMHEALHNHYTQKSLSLSPGKGGGGSGGGGSGGGGSGGGGSGGGGSGGGGSDKTHTCPPCPAPELLGGPSVFLFPPKPKDTLMISRTPEVTCVVVDVSHEDPEVKFNWYVDGVEVHNAKTKPCEEQYGSTYRCVSVLTVLHQDWLNGKEYKCKVSNKALPAPIEKTISKAKGQPREPQVYTLPPSREEMTKNQVSLTCLVKGFYPSDIAVEWESNGQPENNYKTTPPVLDSDGSFFLYSKLTVDKSRWQQGNVFSCSVMHEALHNHYTQKSLSLSPGK

SEQ ID NO: 202 - protein, 504 aa, synthetic construct
  REGION 1..504: note = Synthetic Peptide
QVQLVQSGAEVKKPGASVKVSCKASGYTFTNHIIHWVRQAPGQCLEWMGYINPYPGYHAYNEKFQGRATMTSDTSTSTVYMELSSLRSEDTAVYYCARDGYYRDTDVLDYWGQGTLVTVSSGGGGSGGGGSGGGGSDIQMTQSPSSLSASVGDRVTITCQASQDISNYLNWYQQKPGKAPKLLIYYTSRLHTGVPSRFSGSGSGTDFTFTISSLEPEDIATYYCQQGNTLPWTFGCGTKLEIKSGGGGSEVQLVESGGGLVQPGGSLKLSCAASGFTFNKYAMNWVRQAPGKGLEWVARIRSKYNNYATYYADSVKDRFTISRDDSKNTAYLQMNNLKTEDTAVYYCVRHGNFGNSYISYWAYWGQGTLVTVSSGGGGSGGGGSGGGGSQTVVTQEPSLTVSPGGTVTLTCGSSTGAVTSGNYPNWVQQKPGQAPRGLIGGTKFLAPGTPARFSGSLLGGKAALTLSGVQPEDEAEYYCVLWYSNRWVFGGGTKLTVLHHHHHH

SEQ ID NO: 203 - protein, 5 aa, synthetic construct
  REGION 1..5: note = Synthetic Peptide
DYYMY

SEQ ID NO: 204 - protein, 17 aa, synthetic construct
  REGION 1..17: note = Synthetic Peptide
IISDAGYYTYYSDIIKG

SEQ ID NO: 205 - protein, 12 aa, synthetic construct
  REGION 1..12: note = Synthetic Peptide
GFPLLRHGAMDY

SEQ ID NO: 206 - protein, 11 aa, synthetic construct
  REGION 1..11: note = Synthetic Peptide
KASQNVDANVA

SEQ ID NO: 207 - protein, 7 aa, synthetic construct
  REGION 1..7: note = Synthetic Peptide
SASYVYW

SEQ ID NO: 208 - protein, 9 aa, synthetic construct
  REGION 1..9: note = Synthetic Peptide
QQYDQQLIT

SEQ ID NO: 209 - protein, 121 aa, synthetic construct
  REGION 1..121: note = Synthetic Peptide
QVQLVESGGGLVKPGESLRLSCAASGFTFSDYYMYWVRQAPGKCLEWVAIISDAGYYTYYSDIIKGRFTISRDNAKNSLYLQMNSLKAEDTAVYYCARGFPLLRHGAMDYWGQGTLVTVSS

SEQ ID NO: 210 - protein, 107 aa, synthetic construct
  REGION 1..107: note = Synthetic Peptide
DIQMTQSPSSLSASVGDRVTITCKASQNVDANVAWYQQKPGQAPKSLIYSASYVYWDVPSRFSGSASGTDFTLTISSVQSEDFATYYCQQYDQQLITFGCGTKLEIK

SEQ ID NO: 211 - protein, 243 aa, synthetic construct
  REGION 1..243: note = Synthetic Peptide
QVQLVESGGGLVKPGESLRLSCAASGFTFSDYYMYWVRQAPGKCLEWVAIISDAGYYTYYSDIIKGRFTISRDNAKNSLYLQMNSLKAEDTAVYYCARGFPLLRHGAMDYWGQGTLVTVSSGGGGSGGGGSGGGGSDIQMTQSPSSLSASVGDRVTITCKASQNVDANVAWYQQKPGQAPKSLIYSASYVYWDVPSRFSGSASGTDFTLTISSVQSEDFATYYCQQYDQQLITFGCGTKLEIK

SEQ ID NO: 212 - protein, 498 aa, synthetic construct
  REGION 1..498: note = Synthetic Peptide
QVQLVESGGGLVKPGESLRLSCAASGFTFSDYYMYWVRQAPGKCLEWVAIISDAGYYTYYSDIIKGRFTISRDNAKNSLYLQMNSLKAEDTAVYYCARGFPLLRHGAMDYWGQGTLVTVSSGGGGSGGGGSGGGGSDIQMTQSPSSLSASVGDRVTITCKASQNVDANVAWYQQKPGQAPKSLIYSASYVYWDVPSRFSGSASGTDFTLTISSVQSEDFATYYCQQYDQQLITFGCGTKLEIKSGGGGSEVQLVESGGGLVQPGGSLKLSCAASGFTFNKYAMNWVRQAPGKGLEWVARIRSKYNNYATYYADSVKDRFTISRDDSKNTAYLQMNNLKTEDTAVYYCVRHGNFGNSYISYWAYWGQGTLVTVSSGGGGSGGGGSGGGGSQTVVTQEPSLTVSPGGTVTLTCGSSTGAVTSGNYPNWVQQKPGQAPRGLIGGTKFLAPGTPARFSGSLLGGKAALTLSGVQPEDEAEYYCVLWYSNRWVFGGGTKLTVL

SEQ ID NO: 213 - protein, 986 aa, synthetic construct
  REGION 1..986: note = Synthetic Peptide
QVQLVESGGGLVKPGESLRLSCAASGFTFSDYYMYWVRQAPGKCLEWVAIISDAGYYTYYSDIIKGRFTISRDNAKNSLYLQMNSLKAEDTAVYYCARGFPLLRHGAMDYWGQGTLVTVSSGGGGSGGGGSGGGGSDIQMTQSPSSLSASVGDRVTITCKASQNVDANVAWYQQKPGQAPKSLIYSASYVYWDVPSRFSGSASGTDFTLTISSVQSEDFATYYCQQYDQQLITFGCGTKLEIKSGGGGSEVQLVESGGGLVQPGGSLKLSCAASGFTFNKYAMNWVRQAPGKGLEWVARIRSKYNNYATYYADSVKDRFTISRDDSKNTAYLQMNNLKTEDTAVYYCVRHGNFGNSYISYWAYWGQGTLVTVSSGGGGSGGGGSGGGGSQTVVTQEPSLTVSPGGTVTLTCGSSTGAVTSGNYPNWVQQKPGQAPRGLIGGTKFLAPGTPARFSGSLLGGKAALTLSGVQPEDEAEYYCVLWYSNRWVFGGGTKLTVLGGGGDKTHTCPPCPAPELLGGPSVFLFPPKPKDTLMISRTPEVTCVVVDVSHEDPEVKFNWYVDGVEVHNAKTKPCEEQYGSTYRCVSVLTVLHQDWLNGKEYKCKVSNKALPAPIEKTISKAKGQPREPQVYTLPPSREEMTKNQVSLTCLVKGFYPSDIAVEWESNGQPENNYKTTPPVLDSDGSFFLYSKLTVDKSRWQQGNVFSCSVMHEALHNHYTQKSLSLSPGKGGGGSGGGGSGGGGSGGGGSGGGGSGGGGSDKTHTCPPCPAPELLGGPSVFLFPPKPKDTLMISRTPEVTCVVVDVSHEDPEVKFNWYVDGVEVHNAKTKPCEEQYGSTYRCVSVLTVLHQDWLNGKEYKCKVSNKALPAPIEKTISKAKGQPREPQVYTLPPSREEMTKNQVSLTCLVKGFYPSDIAVEWESNGQPENNYKTTPPVLDSDGSFFLYSKLTVDKSRWQQGNVFSCSVMHEALHNHYTQKSLSLSPGK

SEQ ID NO: 214 - protein, 984 aa, synthetic construct
  REGION 1..984: note = Synthetic Peptide
QVQLVESGGGLVKPGESLRLSCAASGFTFSDYYMYWVRQAPGKCLEWVAIISDAGYYTYYSDIIKGRFTISRDNAKNSLYLQMNSLKAEDTAVYYCARGFPLLRHGAMDYWGQGTLVTVSSGGGGSGGGGSGGGGSDIQMTQSPSSLSASVGDRVTITCKASQNVDANVAWYQQKPGQAPKSLIYSASYVYWDVPSRFSGSASGTDFTLTISSVQSEDFATYYCQQYDQQLITFGCGTKLEIKSGGGGSEVQLVESGGGLVQPGGSLKLSCAASGFTFNKYAMNWVRQAPGKGLEWVARIRSKYNNYATYYADSVKDRFTISRDDSKNTAYLQMNNLKTEDTAVYYCVRHGNFGNSYISYWAYWGQGTLVTVSSGGGGSGGGGSGGGGSQTVVTQEPSLTVSPGGTVTLTCGSSTGAVTSGNYPNWVQQKPGQAPRGLIGGTKFLAPGTPARFSGSLLGGKAALTLSGVQPEDEAEYYCVLWYSNRWVFGGGTKLTVLGGGGDKTHTCPPCPAPELLGGPSVFLFPPKPKDTLMISRTPEVTCVVVDVSHEDPEVKFNWYVDGVEVHNAKTKPCEEQYGSTYRCVSVLTVLHQDWLNGKEYKCKVSNKALPAPIEKTISKAKGQPREPQVYTLPPSREEMTKNQVSLTCLVKGFYPSDIAVEWESNGQPENNYKTTPPVLDSDGSFFLYSKLTVDKSRWQQGNVFSCSVMHEALHNHYTQKSLSLSPGGGGSGGGGSGGGGSGGGGSGGGGSGGGGSDKTHTCPPCPAPELLGGPSVFLFPPKPKDTLMISRTPEVTCVVVDVSHEDPEVKFNWYVDGVEVHNAKTKPCEEQYGSTYRCVSVLTVLHQDWLNGKEYKCKVSNKALPAPIEKTISKAKGQPREPQVYTLPPSREEMTKNQVSLTCLVKGFYPSDIAVEWESNGQPENNYKTTPPVLDSDGSFFLYSKLTVDKSRWQQGNVFSCSVMHEALHNHYTQKSLSLSPGK

SEQ ID NO: 215 - protein, 498 aa, synthetic construct
  REGION 1..498: note = Synthetic Peptide
QVQLVESGGGLVKPGESLRLSCAASGFTFSDYYMYWVRQAPGKCLEWVAIISDAGYYTYYSDIIKGRFTISRDNAKNSLYLQMNSLKAEDTAVYYCARGFPLLRHGAMDYWGQGTLVTVSSGGGGSGGGGSGGGGSDIQMTQSPSSLSASVGDRVTITCKASQNVDANVAWYQQKPGQAPKSLIYSASYVYWDVPSRFSGSASGTDFTLTISSVQSEDFATYYCQQYDQQLITFGCGTKLEIKSGGGGSEVQLVESGGGLVQPGGSLKLSCAASGFTFNKYAMNWVRQAPGKGLEWVARIRSKYNNYATYYADSVKDRFTISRDDSKNTAYLQMNNLKTEDTAVYYCVRHGNFGNSYISYWAYCGQGTLVTVSSGGGGSGGGGSGGGGSQTVVTQEPSLTVSPGGTVTLTCGSSTGAVTSGNYPNWVQQKPGQCPRGLIGGTKFLAPGTPARFSGSLLGGKAALTLSGVQPEDEAEYYCVLWYSNRWVFGGGTKLTVL

SEQ ID NO: 216 - protein, 986 aa, synthetic construct
  REGION 1..986: note = Synthetic Peptide
QVQLVESGGGLVKPGESLRLSCAASGFTFSDYYMYWVRQAPGKCLEWVAIISDAGYYTYYSDIIKGRFTISRDNAKNSLYLQMNSLKAEDTAVYYCARGFPLLRHGAMDYWGQGTLVTVSSGGGGSGGGGSGGGGSDIQMTQSPSSLSASVGDRVTITCKASQNVDANVAWYQQKPGQAPKSLIYSASYVYWDVPSRFSGSASGTDFTLTISSVQSEDFATYYCQQYDQQLITFGCGTKLEIKSGGGGSEVQLVESGGGLVQPGGSLKLSCAASGFTFNKYAMNWVRQAPGKGLEWVARIRSKYNNYATYYADSVKDRFTISRDDSKNTAYLQMNNLKTEDTAVYYCVRHGNFGNSYISYWAYCGQGTLVTVSSGGGGSGGGGSGGGGSQTVVTQEPSLTVSPGGTVTLTCGSSTGAVTSGNYPNWVQQKPGQCPRGLIGGTKFLAPGTPARFSGSLLGGKAALTLSGVQPEDEAEYYCVLWYSNRWVFGGGTKLTVLGGGGDKTHTCPPCPAPELLGGPSVFLFPPKPKDTLMISRTPEVTCVVVDVSHEDPEVKFNWYVDGVEVHNAKTKPCEEQYGSTYRCVSVLTVLHQDWLNGKEYKCKVSNKALPAPIEKTISKAKGQPREPQVYTLPPSREEMTKNQVSLTCLVKGFYPSDIAVEWESNGQPENNYKTTPPVLDSDGSFFLYSKLTVDKSRWQQGNVFSCSVMHEALHNHYTQKSLSLSPGKGGGGSGGGGSGGGGSGGGGSGGGGSGGGGSDKTHTCPPCPAPELLGGPSVFLFPPKPKDTLMISRTPEVTCVVVDVSHEDPEVKFNWYVDGVEVHNAKTKPCEEQYGSTYRCVSVLTVLHQDWLNGKEYKCKVSNKALPAPIEKTISKAKGQPREPQVYTLPPSREEMTKNQVSLTCLVKGFYPSDIAVEWESNGQPENNYKTTPPVLDSDGSFFLYSKLTVDKSRWQQGNVFSCSVMHEALHNHYTQKSLSLSPGK

SEQ ID NO: 217 - protein, 984 aa, synthetic construct
  REGION 1..984: note = Synthetic Peptide
QVQLVESGGGLVKPGESLRLSCAASGFTFSDYYMYWVRQAPGKCLEWVAIISDAGYYTYYSDIIKGRFTISRDNAKNSLYLQMNSLKAEDTAVYYCARGFPLLRHGAMDYWGQGTLVTVSSGGGGSGGGGSGGGGSDIQMTQSPSSLSASVGDRVTITCKASQNVDANVAWYQQKPGQAPKSLIYSASYVYWDVPSRFSGSASGTDFTLTISSVQSEDFATYYCQQYDQQLITFGCGTKLEIKSGGGGSEVQLVESGGGLVQPGGSLKLSCAASGFTFNKYAMNWVRQAPGKGLEWVARIRSKYNNYATYYADSVKDRFTISRDDSKNTAYLQMNNLKTEDTAVYYCVRHGNFGNSYISYWAYCGQGTLVTVSSGGGGSGGGGSGGGGSQTVVTQEPSLTVSPGGTVTLTCGSSTGAVTSGNYPNWVQQKPGQCPRGLIGGTKFLAPGTPARFSGSLLGGKAALTLSGVQPEDEAEYYCVLWYSNRWVFGGGTKLTVLGGGGDKTHTCPPCPAPELLGGPSVFLFPPKPKDTLMISRTPEVTCVVVDVSHEDPEVKFNWYVDGVEVHNAKTKPCEEQYGSTYRCVSVLTVLHQDWLNGKEYKCKVSNKALPAPIEKTISKAKGQPREPQVYTLPPSREEMTKNQVSLTCLVKGFYPSDIAVEWESNGQPENNYKTTPPVLDSDGSFFLYSKLTVDKSRWQQGNVFSCSVMHEALHNHYTQKSLSLSPGGGGSGGGGSGGGGSGGGGSGGGGSGGGGSDKTHTCPPCPAPELLGGPSVFLFPPKPKDTLMISRTPEVTCVVVDVSHEDPEVKFNWYVDGVEVHNAKTKPCEEQYGSTYRCVSVLTVLHQDWLNGKEYKCKVSNKALPAPIEKTISKAKGQPREPQVYTLPPSREEMTKNQVSLTCLVKGFYPSDIAVEWESNGQPENNYKTTPPVLDSDGSFFLYSKLTVDKSRWQQGNVFSCSVMHEALHNHYTQKSLSLSPGK

SEQ ID NO: 218 - protein, 5 aa, synthetic construct
  REGION 1..5: note = Synthetic Peptide
DYYMY

SEQ ID NO: 219 - protein, 17 aa, synthetic construct
  REGION 1..17: note = Synthetic Peptide
IISDGGYYTYYSDIIKG

SEQ ID NO: 220 - protein, 12 aa, synthetic construct
  REGION 1..12: note = Synthetic Peptide
GFPLLRHGAMDY

SEQ ID NO: 221 - protein, 11 aa, synthetic construct
  REGION 1..11: note = Synthetic Peptide
KASQNVDTNVA

SEQ ID NO: 222 - protein, 7 aa, synthetic construct
  REGION 1..7: note = Synthetic Peptide
SASYVYW

SEQ ID NO: 223 - protein, 9 aa, synthetic construct
  REGION 1..9: note = Synthetic Peptide
QQYDQQLIT

SEQ ID NO: 224 - protein, 121 aa, synthetic construct
  REGION 1..121: note = Synthetic Peptide
QVQLVESGGGLVKPGESLRLSCAASGFTFSDYYMYWVRQAPGKGLEWVAIISDGGYYTYYSDIIKGRFTISRDNAKNSLYLQMNSLKAEDTAVYYCARGFPLLRHGAMDYWGQGTLVTVSS

SEQ ID NO: 225 - protein, 121 aa, synthetic construct
  REGION 1..121: note = Synthetic Peptide
QVQLVESGGGLVKPGESLRLSCAASGFTFSDYYMYWVRQAPGKCLEWVAIISDGGYYTYYSDIIKGRFTISRDNAKNSLYLQMNSLKAEDTAVYYCARGFPLLRHGAMDYWGQGTLVTVSS

SEQ ID NO: 226 - protein, 107 aa, synthetic construct
  REGION 1..107: note = Synthetic Peptide
DIQMTQSPSSLSASVGDRVTITCKASQNVDTNVAWYQQKPGQAPKSLIYSASYVYWDVPSRFSGSASGTDFTLTISSVQSEDFATYYCQQYDQQLITFGGGTKLEIK

SEQ ID NO: 227 - protein, 107 aa, synthetic construct
  REGION 1..107: note = Synthetic Peptide
DIQMTQSPSSLSASVGDRVTITCKASQNVDTNVAWYQQKPGQAPKSLIYSASYVYWDVPSRFSGSASGTDFTLTISSVQSEDFATYYCQQYDQQLITFGCGTKLEIK

SEQ ID NO: 228 - protein, 243 aa, synthetic construct
  REGION 1..243: note = Synthetic Peptide
QVQLVESGGGLVKPGESLRLSCAASGFTFSDYYMYWVRQAPGKGLEWVAIISDGGYYTYYSDIIKGRFTISRDNAKNSLYLQMNSLKAEDTAVYYCARGFPLLRHGAMDYWGQGTLVTVSSGGGGSGGGGSGGGGSDIQMTQSPSSLSASVGDRVTITCKASQNVDTNVAWYQQKPGQAPKSLIYSASYVYWDVPSRFSGSASGTDFTLTISSVQSEDFATYYCQQYDQQLITFGGGTKLEIK

SEQ ID NO: 229 - protein, 243 aa, synthetic construct
  REGION 1..243: note = Synthetic Peptide
QVQLVESGGGLVKPGESLRLSCAASGFTFSDYYMYWVRQAPGKCLEWVAIISDGGYYTYYSDIIKGRFTISRDNAKNSLYLQMNSLKAEDTAVYYCARGFPLLRHGAMDYWGQGTLVTVSSGGGGSGGGGSGGGGSDIQMTQSPSSLSASVGDRVTITCKASQNVDTNVAWYQQKPGQAPKSLIYSASYVYWDVPSRFSGSASGTDFTLTISSVQSEDFATYYCQQYDQQLITFGCGTKLEIK

SEQ ID NO: 230 - protein, 498 aa, synthetic construct
  REGION 1..498: note = Synthetic Peptide
QVQLVESGGGLVKPGESLRLSCAASGFTFSDYYMYWVRQAPGKGLEWVAIISDGGYYTYYSDIIKGRFTISRDNAKNSLYLQMNSLKAEDTAVYYCARGFPLLRHGAMDYWGQGTLVTVSSGGGGSGGGGSGGGGSDIQMTQSPSSLSASVGDRVTITCKASQNVDTNVAWYQQKPGQAPKSLIYSASYVYWDVPSRFSGSASGTDFTLTISSVQSEDFATYYCQQYDQQLITFGGGTKLEIKSGGGGSEVQLVESGGGLVQPGGSLKLSCAASGFTFNKYAMNWVRQAPGKGLEWVARIRSKYNNYATYYADSVKDRFTISRDDSKNTAYLQMNNLKTEDTAVYYCVRHGNFGNSYISYWAYWGQGTLVTVSSGGGGSGGGGSGGGGSQTVVTQEPSLTVSPGGTVTLTCGSSTGAVTSGNYPNWVQQKPGQAPRGLIGGTKFLAPGTPARFSGSLLGGKAALTLSGVQPEDEAEYYCVLWYSNRWVFGGGTKLTVL

SEQ ID NO: 231 - protein, 498 aa, synthetic construct
  REGION 1..498: note = Synthetic Peptide
QVQLVESGGGLVKPGESLRLSCAASGFTFSDYYMYWVRQAPGKCLEWVAIISDGGYYTYYSDIIKGRFTISRDNAKNSLYLQMNSLKAEDTAVYYCARGFPLLRHGAMDYWGQGTLVTVSSGGGGSGGGGSGGGGSDIQMTQSPSSLSASVGDRVTITCKASQNVDTNVAWYQQKPGQAPKSLIYSASYVYWDVPSRFSGSASGTDFTLTISSVQSEDFATYYCQQYDQQLITFGCGTKLEIKSGGGGSEVQLVESGGGLVQPGGSLKLSCAASGFTFNKYAMNWVRQAPGKGLEWVARIRSKYNNYATYYADSVKDRFTISRDDSKNTAYLQMNNLKTEDTAVYYCVRHGNFGNSYISYWAYWGQGTLVTVSSGGGGSGGGGSGGGGSQTVVTQEPSLTVSPGGTVTLTCGSSTGAVTSGNYPNWVQQKPGQAPRGLIGGTKFLAPGTPARFSGSLLGGKAALTLSGVQPEDEAEYYCVLWYSNRWVFGGGTKLTVL

SEQ ID NO: 232 - protein, 986 aa, synthetic construct
  REGION 1..986: note = Synthetic Peptide
QVQLVESGGGLVKPGESLRLSCAASGFTFSDYYMYWVRQAPGKGLEWVAIISDGGYYTYYSDIIKGRFTISRDNAKNSLYLQMNSLKAEDTAVYYCARGFPLLRHGAMDYWGQGTLVTVSSGGGGSGGGGSGGGGSDIQMTQSPSSLSASVGDRVTITCKASQNVDTNVAWYQQKPGQAPKSLIYSASYVYWDVPSRFSGSASGTDFTLTISSVQSEDFATYYCQQYDQQLITFGGGTKLEIKSGGGGSEVQLVESGGGLVQPGGSLKLSCAASGFTFNKYAMNWVRQAPGKGLEWVARIRSKYNNYATYYADSVKDRFTISRDDSKNTAYLQMNNLKTEDTAVYYCVRHGNFGNSYISYWAYWGQGTLVTVSSGGGGSGGGGSGGGGSQTVVTQEPSLTVSPGGTVTLTCGSSTGAVTSGNYPNWVQQKPGQAPRGLIGGTKFLAPGTPARFSGSLLGGKAALTLSGVQPEDEAEYYCVLWYSNRWVFGGGTKLTVLGGGGDKTHTCPPCPAPELLGGPSVFLFPPKPKDTLMISRTPEVTCVVVDVSHEDPEVKFNWYVDGVEVHNAKTKPCEEQYGSTYRCVSVLTVLHQDWLNGKEYKCKVSNKALPAPIEKTISKAKGQPREPQVYTLPPSREEMTKNQVSLTCLVKGFYPSDIAVEWESNGQPENNYKTTPPVLDSDGSFFLYSKLTVDKSRWQQGNVFSCSVMHEALHNHYTQKSLSLSPGKGGGGSGGGGSGGGGSGGGGSGGGGSGGGGSDKTHTCPPCPAPELLGGPSVFLFPPKPKDTLMISRTPEVTCVVVDVSHEDPEVKFNWYVDGVEVHNAKTKPCEEQYGSTYRCVSVLTVLHQDWLNGKEYKCKVSNKALPAPIEKTISKAKGQPREPQVYTLPPSREEMTKNQVSLTCLVKGFYPSDIAVEWESNGQPENNYKTTPPVLDSDGSFFLYSKLTVDKSRWQQGNVFSCSVMHEALHNHYTQKSLSLSPGK

SEQ ID NO: 233 - protein, 986 aa, synthetic construct; identical to SEQ ID NO: 232
  REGION 1..986: note = Synthetic Peptide

SEQ ID NO: 234 - protein, 498 aa, synthetic construct
  REGION 1..498: note = Synthetic Peptide
QVQLVESGGGLVKPGESLRLSCAASGFTFSDYYMYWVRQAPGKGLEWVAIISDGGYYTYYSDIIKGRFTISRDNAKNSLYLQMNSLKAEDTAVYYCARGFPLLRHGAMDYWGQGTLVTVSSGGGGSGGGGSGGGGSDIQMTQSPSSLSASVGDRVTITCKASQNVDTNVAWYQQKPGQAPKSLIYSASYVYWDVPSRFSGSASGTDFTLTISSVQSEDFATYYCQQYDQQLITFGGGTKLEIKSGGGGSEVQLVESGGGLVQPGGSLKLSCAASGFTFNKYAMNWVRQAPGKGLEWVARIRSKYNNYATYYADSVKDRFTISRDDSKNTAYLQMNNLKTEDTAVYYCVRHGNFGNSYISYWAYCGQGTLVTVSSGGGGSGGGGSGGGGSQTVVTQEPSLTVSPGGTVTLTCGSSTGAVTSGNYPNWVQQKPGQCPRGLIGGTKFLAPGTPARFSGSLLGGKAALTLSGVQPEDEAEYYCVLWYSNRWVFGGGTKLTVL

SEQ ID NO: 235 - protein, 986 aa, synthetic construct
  REGION 1..986: note = Synthetic Peptide
QVQLVESGGGLVKPGESLRLSCAASGFTFSDYYMYWVRQAPGKGLEWVAIISDGGYYTYYSDIIKGRFTISRDNAKNSLYLQMNSLKAEDTAVYYCARGFPLLRHGAMDYWGQGTLVTVSSGGGGSGGGGSGGGGSDIQMTQSPSSLSASVGDRVTITCKASQNVDTNVAWYQQKPGQAPKSLIYSASYVYWDVPSRFSGSASGTDFTLTISSVQSEDFATYYCQQYDQQLITFGGGTKLEIKSGGGGSEVQLVESGGGLVQPGGSLKLSCAASGFTFNKYAMNWVRQAPGKGLEWVARIRSKYNNYATYYADSVKDRFTISRDDSKNTAYLQMNNLKTEDTAVYYCVRHGNFGNSYISYWAYCGQGTLVTVSSGGGGSGGGGSGGGGSQTVVTQEPSLTVSPGGTVTLTCGSSTGAVTSGNYPNWVQQKPGQCPRGLIGGTKFLAPGTPARFSGSLLGGKAALTLSGVQPEDEAEYYCVLWYSNRWVFGGGTKLTVLGGGGDKTHTCPPCPAPELLGGPSVFLFPPKPKDTLMISRTPEVTCVVVDVSHEDPEVKFNWYVDGVEVHNAKTKPCEEQYGSTYRCVSVLTVLHQDWLNGKEYKCKVSNKALPAPIEKTISKAKGQPREPQVYTLPPSREEMTKNQVSLTCLVKGFYPSDIAVEWESNGQPENNYKTTPPVLDSDGSFFLYSKLTVDKSRWQQGNVFSCSVMHEALHNHYTQKSLSLSPGKGGGGSGGGGSGGGGSGGGGSGGGGSGGGGSDKTHTCPPCPAPELLGGPSVFLFPPKPKDTLMISRTPEVTCVVVDVSHEDPEVKFNWYVDGVEVHNAKTKPCEEQYGSTYRCVSVLTVLHQDWLNGKEYKCKVSNKALPAPIEKTISKAKGQPREPQVYTLPPSREEMTKNQVSLTCLVKGFYPSDIAVEWESNGQPENNYKTTPPVLDSDGSFFLYSKLTVDKSRWQQGNVFSCSVMHEALHNHYTQKSLSLSPGK

SEQ ID NO: 236 - protein, 984 aa, synthetic construct
  REGION 1..984: note = Synthetic Peptide
QVQLVESGGGLVKPGESLRLSCAASGFTFSDYYMYWVRQAPGKGLEWVAIISDGGYYTYYSDIIKGRFTISRDNAKNSLYLQMNSLKAEDTAVYYCARGFPLLRHGAMDYWGQGTLVTVSSGGGGSGGGGSGGGGSDIQMTQSPSSLSASVGDRVTITCKASQNVDTNVAWYQQKPGQAPKSLIYSASYVYWDVPSRFSGSASGTDFTLTISSVQSEDFATYYCQQYDQQLITFGGGTKLEIKSGGGGSEVQLVESGGGLVQPGGSLKLSCAASGFTFNKYAMNWVRQAPGKGLEWVARIRSKYNNYATYYADSVKDRFTISRDDSKNTAYLQMNNLKTEDTAVYYCVRHGNFGNSYISYWAYCGQGTLVTVSSGGGGSGGGGSGGGGSQTVVTQEPSLTVSPGGTVTLTCGSSTGAVTSGNYPNWVQQKPGQCPRGLIGGTKFLAPGTPARFSGSLLGGKAALTLSGVQPEDEAEYYCVLWYSNRWVFGGGTKLTVLGGGGDKTHTCPPCPAPELLGGPSVFLFPPKPKDTLMISRTPEVTCVVVDVSHEDPEVKFNWYVDGVEVHNAKTKPCEEQYGSTYRCVSVLTVLHQDWLNGKEYKCKVSNKALPAPIEKTISKAKGQPREPQVYTLPPSREEMTKNQVSLTCLVKGFYPSDIAVEWESNGQPENNYKTTPPVLDSDGSFFLYSKLTVDKSRWQQGNVFSCSVMHEALHNHYTQKSLSLSPGGGGSGGGGSGGGGSGGGGSGGGGSGGGGSDKTHTCPPCPAPELLGGPSVFLFPPKPKDTLMISRTPEVTCVVVDVSHEDPEVKFNWYVDGVEVHNAKTKPCEEQYGSTYRCVSVLTVLHQDWLNGKEYKCKVSNKALPAPIEKTISKAKGQPREPQVYTLPPSREEMTKNQVSLTCLVKGFYPSDIAVEWESNGQPENNYKTTPPVLDSDGSFFLYSKLTVDKSRWQQGNVFSCSVMHEALHNHYTQKSLSLSPGK

SEQ ID NO: 237 - protein, 986 aa, synthetic construct
  REGION 1..986: note = Synthetic Peptide
QVQLVESGGGLVKPGESLRLSCAASGFTFSDYYMYWVRQAPGKCLEWVAIISDGGYYTYYSDIIKGRFTISRDNAKNSLYLQMNSLKAEDTAVYYCARGFPLLRHGAMDYWGQGTLVTVSSGGGGSGGGGSGGGGSDIQMTQSPSSLSASVGDRVTITCKASQNVDTNVAWYQQKPGQAPKSLIYSASYVYWDVPSRFSGSASGTDFTLTISSVQSEDFATYYCQQYDQQLITFGCGTKLEIKSGGGGSEVQLVESGGGLVQPGGSLKLSCAASGFTFNKYAMNWVRQAPGKGLEWVARIRSKYNNYATYYADSVKDRFTISRDDSKNTAYLQMNNLKTEDTAVYYCVRHGNFGNSYISYWAYWGQGTLVTVSSGGGGSGGGGSGGGGSQTVVTQEPSLTVSPGGTVTLTCGSSTGAVTSGNYPNWVQQKPGQAPRGLIGGTKFLAPGTPARFSGSLLGGKAALTLSGVQPEDEAEYYCVLWYSNRWVFGGGTKLTVLGGGGDKTHTCPPCPAPELLGGPSVFLFPPKPKDTLMISRTPEVTCVVVDVSHEDPEVKFNWYVDGVEVHNAKTKPCEEQYGSTYRCVSVLTVLHQDWLNGKEYKCKVSNKALPAPIEKTISKAKGQPREPQVYTLPPSREEMTKNQVSLTCLVKGFYPSDIAVEWESNGQPENNYKTTPPVLDSDGSFFLYSKLTVDKSRWQQGNVFSCSVMHEALHNHYTQKSLSLSPGKGGGGSGGGGSGGGGSGGGGSGGGGSGGGGSDKTHTCPPCPAPELLGGPSVFLFPPKPKDTLMISRTPEVTCVVVDVSHEDPEVKFNWYVDGVEVHNAKTKPCEEQYGSTYRCVSVLTVLHQDWLNGKEYKCKVSNKALPAPIEKTISKAKGQPREPQVYTLPPSREEMTKNQVSLTCLVKGFYPSDIAVEWESNGQPENNYKTTPPVLDSDGSFFLYSKLTVDKSRWQQGNVFSCSVMHEALHNHYTQKSLSLSPGK

SEQ ID NO: 238 - protein, 984 aa, synthetic construct
  REGION 1..984: note = Synthetic Peptide
QVQLVESGGGLVKPGESLRLSCAASGFTFSDYYMYWVRQAPGKCLEWVAIISDGGYYTYYSDIIKGRFTISRDNAKNSLYLQMNSLKAEDTAVYYCARGFPLLRHGAMDYWGQGTLVTVSSGGGGSGGGGSGGGGSDIQMTQSPSSLSASVGDRVTITCKASQNVDTNVAWYQQKPGQAPKSLIYSASYVYWDVPSRFSGSASGTDFTLTISSVQSEDFATYYCQQYDQQLITFGCGTKLEIKSGGGGSEVQLVESGGGLVQPGGSLKLSCAASGFTFNKYAMNWVRQAPGKGLEWVARIRSKYNNYATYYADSVKDRFTISRDDSKNTAYLQMNNLKTEDTAVYYCVRHGNFGNSYISYWAYWGQGTLVTVSSGGGGSGGGGSGGGGSQTVVTQEPSLTVSPGGTVTLTCGSSTGAVTSGNYPNWVQQKPGQAPRGLIGGTKFLAPGTPARFSGSLLGGKAALTLSGVQPEDEAEYYCVLWYSNRWVFGGGTKLTVLGGGGDKTHTCPPCPAPELLGGPSVFLFPPKPKDTLMISRTPEVTCVVVDVSHEDPEVKFNWYVDGVEVHNAKTKPCEEQYGSTYRCVSVLTVLHQDWLNGKEYKCKVSNKALPAPIEKTISKAKGQPREPQVYTLPPSREEMTKNQVSLTCLVKGFYPSDIAVEWESNGQPENNYKTTPPVLDSDGSFFLYSKLTVDKSRWQQGNVFSCSVMHEALHNHYTQKSLSLSPGGGGSGGGGSGGGGSGGGGSGGGGSGGGGSDKTHTCPPCPAPELLGGPSVFLFPPKPKDTLMISRTPEVTCVVVDVSHEDPEVKFNWYVDGVEVHNAKTKPCEEQYGSTYRCVSVLTVLHQDWLNGKEYKCKVSNKALPAPIEKTISKAKGQPREPQVYTLPPSREEMTKNQVSLTCLVKGFYPSDIAVEWESNGQPENNYKTTPPVLDSDGSFFLYSKLTVDKSRWQQGNVFSCSVMHEALHNHYTQKSLSLSPGK

SEQ ID NO: 239 - protein, 986 aa, synthetic construct
  REGION 1..986: note = Synthetic Peptide
QVQLVESGGGLVKPGESLRLSCAASGFTFSDYYMYWVRQAPGKCLEWVAIISDGGYYTYYSDIIKGRFTISRDNAKNSLYLQMNSLKAEDTAVYYCARGFPLLRHGAMDYWGQGTLVTVSSGGGGSGGGGSGGGGSDIQMTQSPSSLSASVGDRVTITCKASQNVDTNVAWYQQKPGQAPKSLIYSASYVYWDVPSRFSGSASGTDFTLTISSVQSEDFATYYCQQYDQQLITFGCGTKLEIKSGGGGSEVQLVESGGGLVQPGGSLKLSCAASGFTFNKYAMNWVRQAPGKGLEWVARIRSKYNNYATYYADSVKDRFTISRDDSKNTAYLQMNNLKTEDTAVYYCVRHGNFGNSYISYWAYCGQGTLVTVSSGGGGSGGGGSGGGGSQTVVTQEPSLTVSPGGTVTLTCGSSTGAVTSGNYPNWVQQKPGQCPRGLIGGTKFLAPGTPARFSGSLLGGKAALTLSGVQPEDEAEYYCVLWYSNRWVFGGGTKLTVLGGGGDKTHTCPPCPAPELLGGPSVFLFPPKPKDTLMISRTPEVTCVVVDVSHEDPEVKFNWYVDGVEVHNAKTKPCEEQYGSTYRCVSVLTVLHQDWLNGKEYKCKVSNKALPAPIEKTISKAKGQPREPQVYTLPPSREEMTKNQVSLTCLVKGFYPSDIAVEWESNGQPENNYKTTPPVLDSDGSFFLYSKLTVDKSRWQQGNVFSCSVMHEALHNHYTQKSLSLSPGKGGGGSGGGGSGGGGSGGGGSGGGGSGGGGSDKTHTCPPCPAPELLGGPSVFLFPPKPKDTLMISRTPEVTCVVVDVSHEDPEVKFNWYVDGVEVHNAKTKPCEEQYGSTYRCVSVLTVLHQDWLNGKEYKCKVSNKALPAPIEKTISKAKGQPREPQVYTLPPSREEMTKNQVSLTCLVKGFYPSDIAVEWESNGQPENNYKTTPPVLDSDGSFFLYSKLTVDKSRWQQGNVFSCSVMHEALHNHYTQKSLSLSPGK

SEQ ID NO: 240 - protein, 984 aa, synthetic construct
  REGION 1..984: note = Synthetic Peptide
QVQLVESGGGLVKPGESLRLSCAASGFTFSDYYMYWVRQAPGKCLEWVAIISDGGYYTYYSDIIKGRFTISRDNAKNSLYLQMNSLKAEDTAVYYCARGFPLLRHGAMDYWGQGTLVTVSSGGGGSGGGGSGGGGSDIQMTQSPSSLSASVGDRVTITCKASQNVDTNVAWYQQKPGQAPKSLIYSASYVYWDVPSRFSGSASGTDFTLTISSVQSEDFATYYCQQYDQQLITFGCGTKLEIKSGGGGSEVQLVESGGGLVQPGGSLKLSCAASGFTFNKYAMNWVRQAPGKGLEWVARIRSKYNNYATYYADSVKDRFTISRDDSKNTAYLQMNNLKTEDTAVYYCVRHGNFGNSYISYWAYCGQGTLVTVSSGGGGSGGGGSGGGGSQTVVTQEPSLTVSPGGTVTLTCGSSTGAVTSGNYPNWVQQKPGQCPRGLIGGTKFLAPGTPARFSGSLLGGKAALTLSGVQPEDEAEYYCVLWYSNRWVFGGGTKLTVLGGGGDKTHTCPPCPAPELLGGPSVFLFPPKPKDTLMISRTPEVTCVVVDVSHEDPEVKFNWYVDGVEVHNAKTKPCEEQYGSTYRCVSVLTVLHQDWLNGKEYKCKVSNKALPAPIEKTISKAKGQPREPQVYTLPPSREEMTKNQVSLTCLVKGFYPSDIAVEWESNGQPENNYKTTPPVLDSDGSFFLYSKLTVDKSRWQQGNVFSCSVMHEALHNHYTQKSLSLSPGGGGSGGGGSGGGGSGGGGSGGGGSGGGGSDKTHTCPPCPAPELLGGPSVFLFPPKPKDTLMISRTPEVTCVVVDVSHEDPEVKFNWYVDGVEVHNAKTKPCEEQYGSTYRCVSVLTVLHQDWLNGKEYKCKVSNKALPAPIEKTISKAKGQPREPQVYTLPPSREEMTKNQVSLTCLVKGFYPSDIAVEWESNGQPENNYKTTPPVLDSDGSFFLYSKLTVDKSRWQQGNVFSCSVMHEALHNHYTQKSLSLSPGK

SEQ ID NO: 241 - protein, 5 aa, synthetic construct
  REGION 1..5: note = Synthetic Peptide
TYAMS

SEQ ID NO: 242 - protein, 17 aa, synthetic construct
  REGION 1..17: note = Synthetic Peptide
AISGSGGRTFYAESVEG

SEQ ID NO: 243 - protein, 11 aa, synthetic construct
  REGION 1..11: note = Synthetic Peptide
HDYSNYPYFDY

SEQ ID NO: 244 - protein, 12 aa, synthetic construct
  REGION 1..12: note = Synthetic Peptide
RASQSVRSTYLA

SEQ ID NO: 245 - protein, 7 aa, synthetic construct
  REGION 1..7: note = Synthetic Peptide
GASSRAT

SEQ ID NO: 246 - protein, 9 aa, synthetic construct
  REGION 1..9: note = Synthetic Peptide
QQYGDLPFT

SEQ ID NO: 247 - protein, 120 aa, synthetic construct
  REGION 1..120: note = Synthetic Peptide
EVQLLESGGGMVQPGGSLRLSCAASGFTFSTYAMSWVRQAPGKCLEWVSAISGSGGRTFYAESVEGRFTISRDNSKNTLYLQMNSLRAEDTAVYYCAKHDYSNYPYFDYWGQGTLVTVSS

SEQ ID NO: 248 - protein, 108 aa, synthetic construct
  REGION 1..108: note = Synthetic Peptide
EIVLTQSPGTLSLSPGERATLSCRASQSVRSTYLAWYQQKPGQAPRLLIYGASSRATGIPDRFSGSGSGTDFTLTISRLEPEDFAVYSCQQYGDLPFTFGCGTKLEIK

SEQ ID NO: 249 - protein, 243 aa, synthetic construct
  REGION 1..243: note = Synthetic Peptide
EVQLLESGGGMVQPGGSLRLSCAASGFTFSTYAMSWVRQAPGKCLEWVSAISGSGGRTFYAESVEGRFTISRDNSKNTLYLQMNSLRAEDTAVYYCAKHDYSNYPYFDYWGQGTLVTVSSGGGGSGGGGSGGGGSEIVLTQSPGTLSLSPGERATLSCRASQSVRSTYLAWYQQKPGQAPRLLIYGASSRATGIPDRFSGSGSGTDFTLTISRLEPEDFAVYSCQQYGDLPFTFGCGTKLEIK

SEQ ID NO: 250 - protein, 986 aa, synthetic construct
  REGION 1..986: note = Synthetic Peptide
EVQLLESGGGMVQPGGSLRLSCAASGFTFSTYAMSWVRQAPGKCLEWVSAISGSGGRTFYAESVEGRFTISRDNSKNTLYLQMNSLRAEDTAVYYCAKHDYSNYPYFDYWGQGTLVTVSSGGGGSGGGGSGGGGSEIVLTQSPGTLSLSPGERATLSCRASQSVRSTYLAWYQQKPGQAPRLLIYGASSRATGIPDRFSGSGSGTDFTLTISRLEPEDFAVYSCQQYGDLPFTFGCGTKLEIKSGGGGSEVQLVESGGGLVQPGGSLKLSCAASGFTFNKYAMNWVRQAPGKGLEWVARIRSKYNNYATYYADSVKDRFTISRDDSKNTAYLQMNNLKTEDTAVYYCVRHGNFGNSYISYWAYWGQGTLVTVSSGGGGSGGGGSGGGGSQTVVTQEPSLTVSPGGTVTLTCGSSTGAVTSGNYPNWVQQKPGQAPRGLIGGTKFLAPGTPARFSGSLLGGKAALTLSGVQPEDEAEYYCVLWYSNRWVFGGGTKLTVLGGGGDKTHTCPPCPAPELLGGPSVFLFPPKPKDTLMISRTPEVTCVVVDVSHEDPEVKFNWYVDGVEVHNAKTKPCEEQYGSTYRCVSVLTVLHQDWLNGKEYKCKVSNKALPAPIEKTISKAKGQPREPQVYTLPPSREEMTKNQVSLTCLVKGFYPSDIAVEWESNGQPENNYKTTPPVLDSDGSFFLYSKLTVDKSRWQQGNVFSCSVMHEALHNHYTQKSLSLSPGKGGGGSGGGGSGGGGSGGGGSGGGGSGGGGSDKTHTCPPCPAPELLGGPSVFLFPPKPKDTLMISRTPEVTCVVVDVSHEDPEVKFNWYVDGVEVHNAKTKPCEEQYGSTYRCVSVLTVLHQDWLNGKEYKCKVSNKALPAPIEKTISKAKGQPREPQVYTLPPSREEMTKNQVSLTCLVKGFYPSDIAVEWESNGQPENNYKTTPPVLDSDGSFFLYSKLTVDKSRWQQGNVFSCSVMHEALHNHYTQKSLSLSPGK

SEQ ID NO: 251 - protein, 5 aa, synthetic construct
  REGION 1..5: note = Synthetic Peptide
GYYMH

SEQ ID NO: 252 - protein, 17 aa, synthetic construct
  REGION 1..17: note = Synthetic Peptide
WINPNSGGTKYAQKFQG

SEQ ID NO: 253 - protein, 16 aa, synthetic construct
  REGION 1..16: note = Synthetic Peptide
DRITVAGTYYYYGMDV

SEQ ID NO: 254 - protein, 11 aa, synthetic construct
  REGION 1..11: note = Synthetic Peptide
RASQGVNNWLA

SEQ ID NO: 255 - protein, 7 aa, synthetic construct
  REGION 1..7: note = Synthetic Peptide
TASSLQS

SEQ ID NO: 256 - protein, 9 aa, synthetic construct
  REGION 1..9: note = Synthetic Peptide
QQANSFPIT

SEQ ID NO: 257 - protein, 125 aa, synthetic construct
  REGION 1..125: note = Synthetic Peptide
QVQLVQSGAEVKKPGASVKVSCKASGYTFTGYYMHWVRQAPGQCLEWMGWINPNSGGTKYAQKFQGRVTMTRDTSISTAYMELSRLRSDDTAVYYCARDRITVAGTYYYYGMDVWGQGTTVTVSS

SEQ ID NO: 258 - protein, 107 aa, synthetic construct
  REGION 1..107: note = Synthetic Peptide
DIQMTQSPSSVSASVGDRVTITCRASQGVNNWLAWYQQKPGKAPKLLIYTASSLQSGVPSRFSGSGSGTDFTLTIRSLQPEDFATYYCQQANSFPITFGCGTRLEIK

SEQ ID NO: 259 - protein, 247 aa, synthetic construct
  REGION 1..247: note = Synthetic Peptide
QVQLVQSGAEVKKPGASVKVSCKASGYTFTGYYMHWVRQAPGQCLEWMGWINPNSGGTKYAQKFQGRVTMTRDTSISTAYMELSRLRSDDTAVYYCARDRITVAGTYYYYGMDVWGQGTTVTVSSGGGGSGGGGSGGGGSDIQMTQSPSSVSASVGDRVTITCRASQGVNNWLAWYQQKPGKAPKLLIYTASSLQSGVPSRFSGSGSGTDFTLTIRSLQPEDFATYYCQQANSFPITFGCGTRLEIK

SEQ ID NO: 260 - protein, 502 aa, synthetic construct
  REGION 1..502: note = Synthetic Peptide
QVQLVQSGAEVKKPGASVKVSCKASGYTFTGYYMHWVRQAPGQCLEWMGWINPNSGGTKYAQKFQGRVTMTRDTSISTAYMELSRLRSDDTAVYYCARDRITVAGTYYYYGMDVWGQGTTVTVSSGGGGSGGGGSGGGGSDIQMTQSPSSVSASVGDRVTITCRASQGVNNWLAWYQQKPGKAPKLLIYTASSLQSGVPSRFSGSGSGTDFTLTIRSLQPEDFATYYCQQANSFPITFGCGTRLEIKSGGGGSEVQLVESGGGLVQPGGSLKLSCAASGFTFNKYAMNWVRQAPGKGLEWVARIRSKYNNYATYYADSVKDRFTISRDDSKNTAYLQMNNLKTEDTAVYYCVRHGNFGNSYISYWAYWGQGTLVTVSSGGGGSGGGGSGGGGSQTVVTQEPSLTVSPGGTVTLTCGSSTGAVTSGNYPNWVQQKPGQAPRGLIGGTKFLAPGTPARFSGSLLGGKAALTLSGVQPEDEAEYYCVLWYSNRWVFGGGTKLTVL

SEQ ID NO: 261 - protein, 990 aa, synthetic construct
  REGION 1..990: note = Synthetic Peptide
QVQLVQSGAEVKKPGASVKVSCKASGYTFTGYYMHWVRQAPGQCLEWMGWINPNSGGTKYAQKFQGRVTMTRDTSISTAYMELSRLRSDDTAVYYCARDRITVAGTYYYYGMDVWGQGTTVTVSSGGGGSGGGGSGGGGSDIQMTQSPSSVSASVGDRVTITCRASQGVNNWLAWYQQKPGKAPKLLIYTASSLQSGVPSRFSGSGSGTDFTLTIRSLQPEDFATYYCQQANSFPITFGCGTRLEIKSGGGGSEVQLVESGGGLVQPGGSLKLSCAASGFTFNKYAMNWVRQAPGKGLEWVARIRSKYNNYATYYADSVKDRFTISRDDSKNTAYLQMNNLKTEDTAVYYCVRHGNFGNSYISYWAYWGQGTLVTVSSGGGGSGGGGSGGGGSQTVVTQEPSLTVSPGGTVTLTCGSSTGAVTSGNYPNWVQQKPGQAPRGLIGGTKFLAPGTPARFSGSLLGGKAALTLSGVQPEDEAEYYCVLWYSNRWVFGGGTKLTVLGGGGDKTHTCPPCPAPELLGGPSVFLFPPKPKDTLMISRTPEVTCVVVDVSHEDPEVKFNWYVDGVEVHNAKTKPCEEQYGSTYRCVSVLTVLHQDWLNGKEYKCKVSNKALPAPIEKTISKAKGQPREPQVYTLPPSREEMTKNQVSLTCLVKGFYPSDIAVEWESNGQPENNYKTTPPVLDSDGSFFLYSKLTVDKSRWQQGNVFSCSVMHEALHNHYTQKSLSLSPGKGGGGSGGGGSGGGGSGGGGSGGGGSGGGGSDKTHTCPPCPAPELLGGPSVFLFPPKPKDTLMISRTPEVTCVVVDVSHEDPEVKFNWYVDGVEVHNAKTKPCEEQYGSTYRCVSVLTVLHQDWLNGKEYKCKVSNKALPAPIEKTISKAKGQPREPQVYTLPPSREEMTKNQVSLTCLVKGFYPSDIAVEWESNGQPENNYKTTPPVLDSDGSFFLYSKLTVDKSRWQQGNVFSCSVMHEALHNHYTQKSLSLSPGK

SEQ ID NO: 262 - protein, 125 aa, synthetic construct
  REGION 1..125: note = Synthetic Peptide
QVQMVQSGAEVKKHGASVKVSCKASGYTFTGYYMHWVRQAPGQCLEWMGWINPNSGGTKYAQKFQGRVTMTRDTSISTAYMELSRLRSDDTAVYYCARDRITVAGTYYYYGMDVWGQGTTVTVSS

SEQ ID NO: 263 - protein, 107 aa, synthetic construct; identical to SEQ ID NO: 258
  REGION 1..107: note = Synthetic Peptide

SEQ ID NO: 264 - protein, 247 aa, synthetic construct
  REGION 1..247: note = Synthetic Peptide
QVQMVQSGAEVKKHGASVKVSCKASGYTFTGYYMHWVRQAPGQCLEWMGWINPNSGGTKYAQKFQGRVTMTRDTSISTAYMELSRLRSDDTAVYYCARDRITVAGTYYYYGMDVWGQGTTVTVSSGGGGSGGGGSGGGGSDIQMTQSPSSVSASVGDRVTITCRASQGVNNWLAWYQQKPGKAPKLLIYTASSLQSGVPSRFSGSGSGTDFTLTIRSLQPEDFATYYCQQANSFPITFGCGTRLEIK

SEQ ID NO: 265 - protein, 502 aa, synthetic construct
  REGION 1..502: note = Synthetic Peptide
QVQMVQSGAEVKKHGASVKVSCKASGYTFTGYYMHWVRQAPGQCLEWMGWINPNSGGTKYAQKFQGRVTMTRDTSISTAYMELSRLRSDDTAVYYCARDRITVAGTYYYYGMDVWGQGTTVTVSSGGGGSGGGGSGGGGSDIQMTQSPSSVSASVGDRVTITCRASQGVNNWLAWYQQKPGKAPKLLIYTASSLQSGVPSRFSGSGSGTDFTLTIRSLQPEDFATYYCQQANSFPITFGCGTRLEIKSGGGGSEVQLVESGGGLVQPGGSLKLSCAASGFTFNKYAMNWVRQAPGKGLEWVARIRSKYNNYATYYADSVKDRFTISRDDSKNTAYLQMNNLKTEDTAVYYCVRHGNFGNSYISYWAYWGQGTLVTVSSGGGGSGGGGSGGGGSQTVVTQEPSLTVSPGGTVTLTCGSSTGAVTSGNYPNWVQQKPGQAPRGLIGGTKFLAPGTPARFSGSLLGGKAALTLSGVQPEDEAEYYCVLWYSNRWVFGGGTKLTVL

SEQ ID NO: 266 - protein, 990 aa, synthetic construct
  REGION 1..990: note = Synthetic Peptide
QVQMVQSGAEVKKHGASVKVSCKASGYTFTGYYMHWVRQAPGQCLEWMGWINPNSGGTKYAQKFQGRVTMTRDTSISTAYMELSRLRSDDTAVYYCARDRITVAGTYYYYGMDVWGQGTTVTVSSGGGGSGGGGSGGGGSDIQMTQSPSSVSASVGDRVTITCRASQGVNNWLAWYQQKPGKAPKLLIYTASSLQSGVPSRFSGSGSGTDFTLTIRSLQPEDFATYYCQQANSFPITFGCGTRLEIKSGGGGSEVQLVESGGGLVQPGGSLKLSCAASGFTFNKYAMNWVRQAPGKGLEWVARIRSKYNNYATYYADSVKDRFTISRDDSKNTAYLQMNNLKTEDTAVYYCVRHGNFGNSYISYWAYWGQGTLVTVSSGGGGSGGGGSGGGGSQTVVTQEPSLTVSPGGTVTLTCGSSTGAVTSGNYPNWVQQKPGQAPRGLIGGTKFLAPGTPARFSGSLLGGKAALTLSGVQPEDEAEYYCVLWYSNRWVFGGGTKLTVLGGGGDKTHTCPPCPAPELLGGPSVFLFPPKPKDTLMISRTPEVTCVVVDVSHEDPEVKFNWYVDGVEVHNAKTKPCEEQYGSTYRCVSVLTVLHQDWLNGKEYKCKVSNKALPAPIEKTISKAKGQPREPQVYTLPPSREEMTKNQVSLTCLVKGFYPSDIAVEWESNGQPENNYKTTPPVLDSDGSFFLYSKLTVDKSRWQQGNVFSCSVMHEALHNHYTQKSLSLSPGKGGGGSGGGGSGGGGSGGGGSGGGGSGGGGSDKTHTCPPCPAPELLGGPSVFLFPPKPKDTLMISRTPEVTCVVVDVSHEDPEVKFNWYVDGVEVHNAKTKPCEEQYGSTYRCVSVLTVLHQDWLNGKEYKCKVSNKALPAPIEKTISKAKGQPREPQVYTLPPSREEMTKNQVSLTCLVKGFYPSDIAVEWESNGQPENNYKTTPPVLDSDGSFFLYSKLTVDKSRWQQGNVFSCSVMHEALHNHYTQKSLSLSPGK

SEQ ID NO: 267 - protein, 5 aa, synthetic construct
  REGION 1..5: note = Synthetic Peptide
NHGMH

SEQ ID NO: 268 - protein, 17 aa, synthetic construct
  REGION 1..17: note = Synthetic Peptide
GIWSEGSNKYYADAVKG

SEQ ID NO: 269 - protein, 12 aa, synthetic construct
  REGION 1..12: note = Synthetic Peptide
ATYTTGWSYFDY

SEQ ID NO: 270 - protein, 11 aa, synthetic construct
  REGION 1..11: note = Synthetic Peptide
SGDKLGDKYAS

SEQ ID NO: 271 - protein, 7 aa, synthetic construct
  REGION 1..7: note = Synthetic Peptide
QDAKRPS

SEQ ID NO: 272 - protein, 9 aa, synthetic construct
  REGION 1..9: note = Synthetic Peptide
QAFHQSTWV

SEQ ID NO: 273 - protein, 121 aa, synthetic construct
  REGION 1..121: note = Synthetic Peptide
QVQLVESGGGVVQPGRSLRLSCAASGFTFSNHGMHWVRQAPGKCLEWVAGIWSEGSNKYYADAVKGRFTISRDNSKNTLYLQMNSLRAEDTAVYYCARATYTTGWSYFDYWGQGTLVTVSS

SEQ ID NO: 274 - protein, 106 aa, synthetic construct
  REGION 1..106: note = Synthetic Peptide
SYELTQPPSVSVSPGQTASITCSGDKLGDKYASWYQQKSGQSPVLVIYQDAKRPSGIPERFSGSNSGNTATLTISGTQAMDEADYYCQAFHQSTWVFGCGTQLTVL

SEQ ID NO: 275 - protein, 985 aa, synthetic construct
  REGION 1..985: note = Synthetic Peptide
QVQLVESGGGVVQPGRSLRLSCAASGFTFSNHGMHWVRQAPGKCLEWVAGIWSEGSNKYYADAVKGRFTISRDNSKNTLYLQMNSLRAEDTAVYYCARATYTTGWSYFDYWGQGTLVTVSSGGGGSGGGGSGGGGSSYELTQPPSVSVSPGQTASITCSGDKLGDKYASWYQQKSGQSPVLVIYQDAKRPSGIPERFSGSNSGNTATLTISGTQAMDEADYYCQAFHQSTWVFGCGTQLTVLSGGGGSEVQLVESGGGLVQPGGSLKLSCAASGFTFNKYAMNWVRQAPGKGLEWVARIRSKYNNYATYYADSVKDRFTISRDDSKNTAYLQMNNLKTEDTAVYYCVRHGNFGNSYISYWAYWGQGTLVTVSSGGGGSGGGGSGGGGSQTVVTQEPSLTVSPGGTVTLTCGSSTGAVTSGNYPNWVQQKPGQAPRGLIGGTKFLAPGTPARFSGSLLGGKAALTLSGVQPEDEAEYYCVLWYSNRWVFGGGTKLTVLGGGGDKTHTCPPCPAPELLGGPSVFLFPPKPKDTLMISRTPEVTCVVVDVSHEDPEVKFNWYVDGVEVHNAKTKPCEEQYGSTYRCVSVLTVLHQDWLNGKEYKCKVSNKALPAPIEKTISKAKGQPREPQVYTLPPSREEMTKNQVSLTCLVKGFYPSDIAVEWESNGQPENNYKTTPPVLDSDGSFFLYSKLTVDKSRWQQGNVFSCSVMHEALHNHYTQKSLSLSPGKGGGGSGGGGSGGGGSGGGGSGGGGSGGGGSDKTHTCPPCPAPELLGGPSVFLFPPKPKDTLMISRTPEVTCVVVDVSHEDPEVKFNWYVDGVEVHNAKTKPCEEQYGSTYRCVSVLTVLHQDWLNGKEYKCKVSNKALPAPIEKTISKAKGQPREPQVYTLPPSREEMTKNQVSLTCLVKGFYPSDIAVEWESNGQPENNYKTTPPVLDSDGSFFLYSKLTVDKSRWQQGNVFSCSVMHEALHNHYTQKSLSLSPGK

SEQ ID NO: 276 - protein, 5 aa, synthetic construct
  REGION 1..5: note = Synthetic Peptide
NHAMH

SEQ ID NO: 277 - protein, 17 aa, synthetic construct
  REGION 1..17: note = Synthetic Peptide
GIWSEGSNKYYAESVKG

SEQ ID NO: 278 - protein, 12 aa, synthetic construct
  REGION 1..12: note = Synthetic Peptide
ATYTTGWSYFDY

SEQ ID NO: 279 - protein, 11 aa, synthetic construct
  REGION 1..11: note = Synthetic Peptide
SGDKLGDKYAS

SEQ ID NO: 280 - protein, 7 aa, synthetic construct
  REGION 1..7: note = Synthetic Peptide
QDRKRPS

SEQ ID NO: 281 - protein, 9 aa, synthetic construct
  REGION 1..9: note = Synthetic Peptide
QAYDASTWV

SEQ ID NO: 282 - protein, 121 aa, synthetic construct
  REGION 1..121: note = Synthetic Peptide
QVQLVESGGGVVQPGRSLRLSCAASGFTFSNHAMHWVRQAPGKCLEWVAGIWSEGSNKYYAESVKGRFTISRDNSKNTLYLQMNSLRAEDTAVYYCARATYTTGWSYFDYWGQGTLVTVSS

SEQ ID NO: 283 - protein, 106 aa, synthetic construct
  REGION 1..106: note = Synthetic Peptide
SYELTQPPSVSVSPGQTASITCSGDKLGDKYASWYQQKSGQSPVLVIYQDRKRPSGIPERFSGSNSGNTATLTISGTQAMDEADYYCQAYDASTWVFGCGTQLTVL

SEQ ID NO: 284 - protein, 985 aa, synthetic construct
  REGION 1..985: note = Synthetic Peptide
QVQLVESGGGVVQPGRSLRLSCAASGFTFSNHAMHWVRQAPGKCLEWVAGIWSEGSNKYYAESVKGRFTISRDNSKNTLYLQMNSLRAEDTAVYYCARATYTTGWSYFDYWGQGTLVTVSSGGGGSGGGGSGGGGSSYELTQPPSVSVSPGQTASITCSGDKLGDKYASWYQQKSGQSPVLVIYQDRKRPSGIPERFSGSNSGNTATLTISGTQAMDEADYYCQAYDASTWVFGCGTQLTVLSGGGGSEVQLVESGGGLVQPGGSLKLSCAASGFTFNKYAMNWVRQAPGKGLEWVARIRSKYNNYATYYADSVKDRFTISRDDSKNTAYLQMNNLKTEDTAVYYCVRHGNFGNSYISYWAYWGQGTLVTVSSGGGGSGGGGSGGGGSQTVVTQEPSLTVSPGGTVTLTCGSSTGAVTSGNYPNWVQQKPGQAPRGLIGGTKFLAPGTPARFSGSLLGGKAALTLSGVQPEDEAEYYCVLWYSNRWVFGGGTKLTVLGGGGDKTHTCPPCPAPELLGGPSVFLFPPKPKDTLMISRTPEVTCVVVDVSHEDPEVKFNWYVDGVEVHNAKTKPCEEQYGSTYRCVSVLTVLHQDWLNGKEYKCKVSNKALPAPIEKTISKAKGQPREPQVYTLPPSREEMTKNQVSLTCLVKGFYPSDIAVEWESNGQPENNYKTTPPVLDSDGSFFLYSKLTVDKSRWQQGNVFSCSVMHEALHNHYTQKSLSLSPGKGGGGSGGGGSGGGGSGGGGSGGGGSGGGGSDKTHTCPPCPAPELLGGPSVFLFPPKPKDTLMISRTPEVTCVVVDVSHEDPEVKFNWYVDGVEVHNAKTKPCEEQYGSTYRCVSVLTVLHQDWLNGKEYKCKVSNKALPAPIEKTISKAKGQPREPQVYTLPPSREEMTKNQVSLTCLVKGFYPSDIAVEWESNGQPENNYKTTPPVLDSDGSFFLYSKLTVDKSRWQQGNVFSCSVMHEALHNHYTQKSLSLSPGK

SEQ ID NO: 285 - protein, 5 aa, synthetic construct
  REGION 1..5: note = Synthetic Peptide
GYYWS

SEQ ID NO: 286 - protein, 16 aa, synthetic construct
  REGION 1..16: note = Synthetic Peptide
DIDASGSTKYNPSLKS

SEQ ID NO: 287 - protein, 12 aa, synthetic construct
  REGION 1..12: note = Synthetic Peptide
KKYSTVWSYFDN

SEQ ID NO: 288 - protein, 12 aa, synthetic construct
  REGION 1..12: note = Synthetic Peptide
KKYSTVWSYFDN

SEQ ID NO: 289 - protein, 7 aa, synthetic construct
  REGION 1..7: note = Synthetic Peptide
QDRKRPS

SEQ ID NO: 290 - protein, 9 aa, synthetic construct
  REGION 1..9: note = Synthetic Peptide
QAWGSSTAV

SEQ ID NO: 291 - protein, 120 aa, synthetic construct
  REGION 1..120: note = Synthetic Peptide
QVQLQQWGAGLLKPSETLSLTCAVYGGSFSGYYWSWIRQPPGKCLEWIGDIDASGSTKYNPSLKSRVTISLDTSKNQFSLKLNSVTAADTAVYFCARKKYSTVWSYFDNWGQGTLVTVSS

SEQ ID NO: 292 - protein, 106 aa, synthetic construct
  REGION 1..106: note = Synthetic Peptide
SYELTQPSSVSVPPGQTASITCSGDKLGDKYASWYQQKPGQSPVLVIYQDRKRPSGVPERFSGSNSGNTATLTISGTQAMDEADYYCQAWGSSTAVFGCGTKLTVL

SEQ ID NO: 293 - protein, 984 aa, synthetic construct
  REGION 1..984: note = Synthetic Peptide
QVQLQQWGAGLLKPSETLSLTCAVYGGSFSGYYWSWIRQPPGKCLEWIGDIDASGSTKYNPSLKSRVTISLDTSKNQFSLKLNSVTAADTAVYFCARKKYSTVWSYFDNWGQGTLVTVSSGGGGSGGGGSGGGGSSYELTQPSSVSVPPGQTASITCSGDKLGDKYASWYQQKPGQSPVLVIYQDRKRPSGVPERFSGSNSGNTATLTISGTQAMDEADYYCQAWGSSTAVFGCGTKLTVLSGGGGSEVQLVESGGGLVQPGGSLKLSCAASGFTFNKYAMNWVRQAPGKGLEWVARIRSKYNNYATYYADSVKDRFTISRDDSKNTAYLQMNNLKTEDTAVYYCVRHGNFGNSYISYWAYWGQGTLVTVSSGGGGSGGGGSGGGGSQTVVTQEPSLTVSPGGTVTLTCGSSTGAVTSGNYPNWVQQKPGQAPRGLIGGTKFLAPGTPARFSGSLLGGKAALTLSGVQPEDEAEYYCVLWYSNRWVFGGGTKLTVLGGGGDKTHTCPPCPAPELLGGPSVFLFPPKPKDTLMISRTPEVTCVVVDVSHEDPEVKFNWYVDGVEVHNAKTKPCEEQYGSTYRCVSVLTVLHQDWLNGKEYKCKVSNKALPAPIEKTISKAKGQPREPQVYTLPPSREEMTKNQVSLTCLVKGFYPSDIAVEWESNGQPENNYKTTPPVLDSDGSFFLYSKLTVDKSRWQQGNVFSCSVMHEALHNHYTQKSLSLSPGKGGGGSGGGGSGGGGSGGGGSGGGGSGGGGSDKTHTCPPCPAPELLGGPSVFLFPPKPKDTLMISRTPEVTCVVVDVSHEDPEVKFNWYVDGVEVHNAKTKPCEEQYGSTYRCVSVLTVLHQDWLNGKEYKCKVSNKALPAPIEKTISKAKGQPREPQVYTLPPSREEMTKNQVSLTCLVKGFYPSDIAVEWESNGQPENNYKTTPPVLDSDGSFFLYSKLTVDKSRWQQGNVFSCSVMHEALHNHYTQKSLSLSPGK

SEQ ID NO: 294 - protein, 5 aa, synthetic construct
  REGION 1..5: note = Synthetic Peptide
GYYWS

SEQ ID NO: 295 - protein, 16 aa, synthetic construct
  REGION 1..16: note = Synthetic Peptide
DIDYSGSTKYNPSLKS

SEQ ID NO: 296 - protein, 12 aa, synthetic construct
  REGION 1..12: note = Synthetic Peptide
KKYSTVWSYFDY

SEQ ID NO: 297 - protein, 11 aa, synthetic construct
  REGION 1..11: note = Synthetic Peptide
SGDKLGDKYAN

SEQ ID NO: 298 - protein, 7 aa, synthetic construct
  REGION 1..7: note = Synthetic Peptide
HDNKRPS

SEQ ID NO: 299 - protein, 9 aa, synthetic construct
  REGION 1..9: note = Synthetic Peptide
QAYGISSAV

SEQ ID NO: 300 - protein, 120 aa, synthetic construct
  REGION 1..120: note = Synthetic Peptide
QVQLQQWGAGLLKPSETLSLTCAVYGGSFSGYYWSWIRQPPGKCLEWIGDIDYSGSTKYNPSLKSRVTISLDTSKNQFSLKLNSVTAADTAVYFCARKKYSTVWSYFDYWGQGTLVTVSS

SEQ ID NO: 301 - protein, 106 aa, synthetic construct
  REGION 1..106: note = Synthetic Peptide
SYELTQPASASVSPGQTASITCSGDKLGDKYANWYQQKPGQSPILVIYHDNKRPSGIPERFSGSNSGNTATLTISGTQAMDEADYYCQAYGISSAVFGCGTKLTVL

SEQ ID NO: 302 - protein, 984 aa, synthetic construct
  REGION 1..984: note = Synthetic Peptide
QVQLQQWGAGLLKPSETLSLTCAVYGGSFSGYYWSWIRQPPGKCLEWIGDIDYSGSTKYNPSLKSRVTISLDTSKNQFSLKLNSVTAADTAVYFCARKKYSTVWSYFDYWGQGTLVTVSSGGGGSGGGGSGGGGSSYELTQPASASVSPGQTASITCSGDKLGDKYANWYQQKPGQSPILVIYHDNKRPSGIPERFSGSNSGNTATLTISGTQAMDEADYYCQAYGISSAVFGCGTKLTVLSGGGGSEVQLVESGGGLVQPGGSLKLSCAASGFTFNKYAMNWVRQAPGKGLEWVARIRSKYNNYATYYADSVKDRFTISRDDSKNTAYLQMNNLKTEDTAVYYCVRHGNFGNSYISYWAYWGQGTLVTVSSGGGGSGGGGSGGGGSQTVVTQEPSLTVSPGGTVTLTCGSSTGAVTSGNYPNWVQQKPGQAPRGLIGGTKFLAPGTPARFSGSLLGGKAALTLSGVQPEDEAEYYCVLWYSNRWVFGGGTKLTVLGGGGDKTHTCPPCPAPELLGGPSVFLFPPKPKDTLMISRTPEVTCVVVDVSHEDPEVKFNWYVDGVEVHNAKTKPCEEQYGSTYRCVSVLTVLHQDWLNGKEYKCKVSNKALPAPIEKTISKAKGQPREPQVYTLPPSREEMTKNQVSLTCLVKGFYPSDIAVEWESNGQPENNYKTTPPVLDSDGSFFLYSKLTVDKSRWQQGNVFSCSVMHEALHNHYTQKSLSLSPGKGGGGSGGGGSGGGGSGGGGSGGGGSGGGGSDKTHTCPPCPAPELLGGPSVFLFPPKPKDTLMISRTPEVTCVVVDVSHEDPEVKFNWYVDGVEVHNAKTKPCEEQYGSTYRCVSVLTVLHQDWLNGKEYKCKVSNKALPAPIEKTISKAKGQPREPQVYTLPPSREEMTKNQVSLTCLVKGFYPSDIAVEWESNGQPENNYKTTPPVLDSDGSFFLYSKLTVDKSRWQQGNVFSCSVMHEALHNHYTQKSLSLSPGK

SEQ ID NO: 303 - protein, 5 aa, synthetic construct
  REGION 1..5: note = Synthetic Peptide
SYPIN

SEQ ID NO: 304 - protein, 16 aa, synthetic construct
  REGION 1..16: note = Synthetic Peptide
VIWTGGGTNYASSVKG

SEQ ID NO: 305 - protein, 15 aa, synthetic construct
  REGION 1..15: note = Synthetic Peptide
SRGVYDFDGRGAMDY

SEQ ID NO: 306 - protein, 17 aa, synthetic construct
  REGION 1..17: note = Synthetic Peptide
KSSQSLLYSSNQKNYFA

SEQ ID NO: 307 - protein, 7 aa, synthetic construct
  REGION 1..7: note = Synthetic Peptide
WASTRES

SEQ ID NO: 308 - protein, 9 aa, synthetic construct
  REGION 1..9: note = Synthetic Peptide
QQYYSYPYT

SEQ ID NO: 309 - protein, 123 aa, synthetic construct
  REGION 1..123: note = Synthetic Peptide
EVQLLESGGGLVQPGGSLRLSCAASGFSFSSYPINWVRQAPGKGLEWVGVIWTGGGTNYASSVKGRFTISRDNSKNTVYLQMNSLRAEDTAVYYCAKSRGVYDFDGRGAMDYWGQGTLVTVSS

SEQ ID NO: 310 - protein, 113 aa, synthetic construct
  REGION 1..113: note = Synthetic Peptide
DIVMTQSPDSLAVSLGERATINCKSSQSLLYSSNQKNYFAWYQQKPGQPPKLLIYWASTRESGVPDRFSGSGSGTDFTLTISSLQAEDVAVYYCQQYYSYPYTFGQGTKLEIK

SEQ ID NO: 311 - protein, 251 aa, synthetic construct
  REGION 1..251: note = Synthetic Peptide
EVQLLESGGGLVQPGGSLRLSCAASGFSFSSYPINWVRQAPGKGLEWVGVIWTGGGTNYASSVKGRFTISRDNSKNTVYLQMNSLRAEDTAVYYCAKSRGVYDFDGRGAMDYWGQGTLVTVSSGGGGSGGGGSGGGGSDIVMTQSPDSLAVSLGERATINCKSSQSLLYSSNQKNYFAWYQQKPGQPPKLLIYWASTRESGVPDRFSGSGSGTDFTLTISSLQAEDVAVYYCQQYYSYPYTFGQGTKLEIK

SEQ ID NO: 312 - protein, 506 aa, synthetic construct
  REGION 1..506: note = Synthetic Peptide
EVQLLESGGGLVQPGGSLRLSCAASGFSFSSYPINWVRQAPGKGLEWVGVIWTGGGTNYASSVKGRFTISRDNSKNTVYLQMNSLRAEDTAVYYCAKSRGVYDFDGRGAMDYWGQGTLVTVSSGGGGSGGGGSGGGGSDIVMTQSPDSLAVSLGERATINCKSSQSLLYSSNQKNYFAWYQQKPGQPPKLLIYWASTRESGVPDRFSGSGSGTDFTLTISSLQAEDVAVYYCQQYYSYPYTFGQGTKLEIKSGGGGSEVQLVESGGGLVQPGGSLKLSCAASGFTFNKYAMNWVRQAPGKGLEWVARIRSKYNNYATYYADSVKDRFTISRDDSKNTAYLQMNNLKTEDTAVYYCVRHGNFGNSYISYWAYWGQGTLVTVSSGGGGSGGGGSGGGGSQTVVTQEPSLTVSPGGTVTLTCGSSTGAVTSGNYPNWVQQKPGQAPRGLIGGTKFLAPGTPARFSGSLLGGKAALTLSGVQPEDEAEYYCVLWYSNRWVFGGGTKLTVL

SEQ ID NO: 313 - protein, 994 aa, synthetic construct
  REGION 1..994: note = Synthetic Peptide
EVQLLESGGGLVQPGGSLRLSCAASGFSFSSYPINWVRQAPGKGLEWVGVIWTGGGTNYASSVKGRFTISRDNSKNTVYLQMNSLRAEDTAVYYCAKSRGVYDFDGRGAMDYWGQGTLVTVSSGGGGSGGGGSGGGGSDIVMTQSPDSLAVSLGERATINCKSSQSLLYSSNQKNYFAWYQQKPGQPPKLLIYWASTRESGVPDRFSGSGSGTDFTLTISSLQAEDVAVYYCQQYYSYPYTFGQGTKLEIKSGGGGSEVQLVESGGGLVQPGGSLKLSCAASGFTFNKYAMNWVRQAPGKGLEWVARIRSKYNNYATYYADSVKDRFTISRDDSKNTAYLQMNNLKTEDTAVYYCVRHGNFGNSYISYWAYWGQGTLVTVSSGGGGSGGGGSGGGGSQTVVTQEPSLTVSPGGTVTLTCGSSTGAVTSGNYPNWVQQKPGQAPRGLIGGTKFLAPGTPARFSGSLLGGKAALTLSGVQPEDEAEYYCVLWYSNRWVFGGGTKLTVLGGGGDKTHTCPPCPAPELLGGPSVFLFPPKPKDTLMISRTPEVTCVVVDVSHEDPEVKFNWYVDGVEVHNAKTKPCEEQYGSTYRCVSVLTVLHQDWLNGKEYKCKVSNKALPAPIEKTISKAKGQPREPQVYTLPPSREEMTKNQVSLTCLVKGFYPSDIAVEWESNGQPENNYKTTPPVLDSDGSFFLYSKLTVDKSRWQQGNVFSCSVMHEALHNHYTQKSLSLSPGKGGGGSGGGGSGGGGSGGGGSGGGGSGGGGSDKTHTCPPCPAPELLGGPSVFLFPPKPKDTLMISRTPEVTCVVVDVSHEDPEVKFNWYVDGVEVHNAKTKPCEEQYGSTYRCVSVLTVLHQDWLNGKEYKCKVSNKALPAPIEKTISKAKGQPREPQVYTLPPSREEMTKNQVSLTCLVKGFYPSDIAVEWESNGQPENNYKTTPPVLDSDGSFFLYSKLTVDKSRWQQGNVFSCSVMHEALHNHYTQKSLSLSPGK

SEQ ID NO: 314 - protein, 15 aa, synthetic construct
  REGION 1..15: note = Synthetic Peptide
KASQSVDYDGDSYLN

SEQ ID NO: 315 - protein, 7 aa, synthetic construct
  REGION 1..7: note = Synthetic Peptide
DASNLVS

SEQ ID NO: 316 - protein, 9 aa, synthetic construct
  REGION 1..9: note = Synthetic Peptide
QQSTEDPWT

SEQ ID NO: 317 - protein, 5 aa, synthetic construct
  REGION 1..5: note = Synthetic Peptide
SYWMN

SEQ ID NO: 318 - protein, 17 aa, synthetic construct
  REGION 1..17: note = Synthetic Peptide
QIWPGDGDTNYNGKFKG

SEQ ID NO: 319 - protein, 15 aa, synthetic construct
  REGION 1..15: note = Synthetic Peptide
RETTTVGRYYYAMDY

SEQ ID NO: 320 - protein, 111 aa, synthetic construct
  REGION 1..111: note = Synthetic Peptide
DIQLTQSPASLAVSLGQRATISCKASQSVDYDGDSYLNWYQQIPGQPPKLLIYDASNLVSGIPPRFSGSGSGTDFTLNIHPVEKVDAATYHCQQSTEDPWTFGGGTKLEIK

SEQ ID NO: 321 - protein, 124 aa, synthetic construct
  REGION 1..124: note = Synthetic Peptide
QVQLQQSGAELVRPGSSVKISCKASGYAFSSYWMNWVKQRPGQGLEWIGQIWPGDGDTNYNGKFKGKATLTADESSSTAYMQLSSLASEDSAVYFCARRETTTVGRYYYAMDYWGQGTTVTVSS

SEQ ID NO: 322 - protein, 250 aa, synthetic construct
  REGION 1..250: note = Synthetic Peptide
DIQLTQSPASLAVSLGQRATISCKASQSVDYDGDSYLNWYQQIPGQPPKLLIYDASNLVSGIPPRFSGSGSGTDFTLNIHPVEKVDAATYHCQQSTEDPWTFGGGTKLEIKGGGGSGGGGSGGGGSQVQLQQSGAELVRPGSSVKISCKASGYAFSSYWMNWVKQRPGQGLEWIGQIWPGDGDTNYNGKFKGKATLTADESSSTAYMQLSSLASEDSAVYFCARRETTTVGRYYYAMDYWGQGTTVTVSS

SEQ ID NO: 323 - protein, 5 aa, synthetic construct
  REGION 1..5: note = Synthetic Peptide
RYTMH

SEQ ID NO: 324 - protein, 17 aa, synthetic construct
  REGION 1..17: note = Synthetic Peptide
YINPSRGYTNYNQKFKD

SEQ ID NO: 325 - protein, 10 aa, synthetic construct
  REGION 1..10: note = Synthetic Peptide
YYDDHYCLDY

SEQ ID NO: 326 - protein, 10 aa, synthetic construct
  REGION 1..10: note = Synthetic Peptide
RASSSVSYMN

SEQ ID NO: 327 - protein, 7 aa, synthetic construct
  REGION 1..7: note = Synthetic Peptide
DTSKVAS

SEQ ID NO: 328 - protein, 9 aa, synthetic construct
  REGION 1..9: note = Synthetic Peptide
QQWSSNPLT

SEQ ID NO: 329 - protein, 119 aa, synthetic construct
  REGION 1..119: note = Synthetic Peptide
DIKLQQSGAELARPGASVKMSCKTSGYTFTRYTMHWVKQRPGQGLEWIGYINPSRGYTNYNQKFKDKATLTTDKSSSTAYMQLSSLTSEDSAVYYCARYYDDHYCLDYWGQGTTLTVSS

SEQ ID NO: 330 - protein, 108 aa, synthetic construct
  REGION 1..108: note = Synthetic Peptide
VDDIQLTQSPAIMSASPGEKVTMTCRASSSVSYMNWYQQKSGTSPKRWIYDTSKVASGVPYRFSGSGSGTSYSLTISSMEAEDAATYYCQQWSSNPLTFGAGTKLELK

SEQ ID NO: 331 - protein, 243 aa, synthetic construct
  REGION 1..243: note = Synthetic Peptide
DIKLQQSGAELARPGASVKMSCKTSGYTFTRYTMHWVKQRPGQGLEWIGYINPSRGYTNYNQKFKDKATLTTDKSSSTAYMQLSSLTSEDSAVYYCARYYDDHYCLDYWGQGTTLTVSSVEGGSGGSGGSGGSGGVDDIQLTQSPAIMSASPGEKVTMTCRASSSVSYMNWYQQKSGTSPKRWIYDTSKVASGVPYRFSGSGSGTSYSLTISSMEAEDAATYYCQQWSSNPLTFGAGTKLELK

SEQ ID NO: 332 - protein, 504 aa, synthetic construct
  REGION 1..504: note = Synthetic Peptide
DIQLTQSPASLAVSLGQRATISCKASQSVDYDGDSYLNWYQQIPGQPPKLLIYDASNLVSGIPPRFSGSGSGTDFTLNIHPVEKVDAATYHCQQSTEDPWTFGGGTKLEIKGGGGSGGGGSGGGGSQVQLQQSGAELVRPGSSVKISCKASGYAFSSYWMNWVKQRPGQGLEWIGQIWPGDGDTNYNGKFKGKATLTADESSSTAYMQLSSLASEDSAVYFCARRETTTVGRYYYAMDYWGQGTTVTVSSGGGGSDIKLQQSGAELARPGASVKMSCKTSGYTFTRYTMHWVKQRPGQGLEWIGYINPSRGYTNYNQKFKDKATLTTDKSSSTAYMQLSSLTSEDSAVYYCARYYDDHYCLDYWGQGTTLTVSSVEGGSGGSGGSGGSGGVDDIQLTQSPAIMSASPGEKVTMTCRASSSVSYMNWYQQKSGTSPKRWIYDTSKVASGVPYRFSGSGSGTSYSLTISSMEAEDAATYYCQQWSSNPLTFGAGTKLELKHHHHHH

SEQ ID NO: 333 - protein, 4 aa, synthetic construct
  REGION 1..4: note = Synthetic Peptide
GGGG

SEQ ID NO: 334 - protein, 5 aa, synthetic construct
  REGION 1..5: note = Synthetic Peptide
GGGGS

SEQ ID NO: 335 - protein, 5 aa, synthetic construct
  REGION 1..5: note = Synthetic Peptide
GGGGQ

SEQ ID NO: 336 - protein, 6 aa, synthetic construct
  REGION 1..6: note = Synthetic Peptide
PGGGGS

SEQ ID NO: 337 - protein, 6 aa, synthetic construct
  REGION 1..6: note = Synthetic Peptide
PGGDGS

SEQ ID NO: 338 - protein, 6 aa, synthetic construct
  REGION 1..6: note = Synthetic Peptide
SGGGGS

SEQ ID NO: 339 - protein, 9 aa, synthetic construct
  REGION 1..9: note = Synthetic Peptide
GGGGSGGGS

SEQ ID NO: 340 - protein, 10 aa, synthetic construct
  REGION 1..10: note = Synthetic Peptide
GGGGSGGGGS

SEQ ID NO: 341 - protein, 15 aa, synthetic construct
  REGION 1..15: note = Synthetic Peptide
GGGGSGGGGSGGGGS

SEQ ID NO: 342 - protein, 6 aa, synthetic construct
  REGION 1..6: note = Synthetic Peptide
  REPEAT 1..6: note = Repeat 1-4 times
GGGGSX

SEQ ID NO: 343 - protein, 6 aa, synthetic construct
  REGION 1..6: note = Synthetic Peptide
HHHHHH

SEQ ID NO: 344 - protein, 484 aa, synthetic construct
  REGION 1..484: note = Synthetic Peptide
DKTHTCPPCPAPELLGGPSVFLFPPKPKDTLMISRTPEVTCVVVDVSHEDPEVKFNWYVDGVEVHNAKTKPCEEQYGSTYRCVSVLTVLHQDWLNGKEYKCKVSNKALPAPIEKTISKAKGQPREPQVYTLPPSREEMTKNQVSLTCLVKGFYPSDIAVEWESNGQPENNYKTTPPVLDSDGSFFLYSKLTVDKSRWQQGNVFSCSVMHEALHNHYTQKSLSLSPGKGGGGSGGGGSGGGGSGGGGSGGGGSGGGGSDKTHTCPPCPAPELLGGPSVFLFPPKPKDTLMISRTPEVTCVVVDVSHEDPEVKFNWYVDGVEVHNAKTKPCEEQYGSTYRCVSVLTVLHQDWLNGKEYKCKVSNKALPAPIEKTISKAKGQPREPQVYTLPPSREEMTKNQVSLTCLVKGFYPSDIAVEWESNGQPENNYKTTPPVLDSDGSFFLYSKLTVDKSRWQQGNVFSCSVMHEALHNHYTQKSLSLSPGK

SEQ ID NO: 345 - protein, 482 aa, synthetic construct
  REGION 1..482: note = Synthetic Peptide
DKTHTCPPCPAPELLGGPSVFLFPPKPKDTLMISRTPEVTCVVVDVSHEDPEVKFNWYVDGVEVHNAKTKPCEEQYGSTYRCVSVLTVLHQDWLNGKEYKCKVSNKALPAPIEKTISKAKGQPREPQVYTLPPSREEMTKNQVSLTCLVKGFYPSDIAVEWESNGQPENNYKTTPPVLDSDGSFFLYSKLTVDKSRWQQGNVFSCSVMHEALHNHYTQKSLSLSPGGGGSGGGGSGGGGSGGGGSGGGGSGGGGSDKTHTCPPCPAPELLGGPSVFLFPPKPKDTLMISRTPEVTCVVVDVSHEDPEVKFNWYVDGVEVHNAKTKPCEEQYGSTYRCVSVLTVLHQDWLNGKEYKCKVSNKALPAPIEKTISKAKGQPREPQVYTLPPSREEMTKNQVSLTCLVKGFYPSDIAVEWESNGQPENNYKTTPPVLDSDGSFFLYSKLTVDKSRWQQGNVFSCSVMHEALHNHYTQKSLSLSPGK

SEQ ID NO: 346 - protein, 5 aa, synthetic construct
  REGION 1..5: note = Synthetic Peptide
NARMG

SEQ ID NO: 347 - protein, 19 aa, synthetic construct
  REGION 1..19: note = Synthetic Peptide
RIKSKTEGGTRDYAAPVKG

SEQ ID NO: 348 - protein, 4 aa, synthetic construct
  REGION 1..4: note = Synthetic Peptide
YSGV

SEQ ID NO: 349 - protein, 17 aa, synthetic construct
  REGION 1..17: note = Synthetic Peptide
KSSQSVLYSSNNKNYLA

SEQ ID NO: 350 - protein, 7 aa, synthetic construct
  REGION 1..7: note = Synthetic Peptide
WASTRES

SEQ ID NO: 351 - protein, 9 aa, synthetic construct
  REGION 1..9: note = Synthetic Peptide
QQYYSIPIT

SEQ ID NO: 352 - protein, 115 aa, synthetic construct; identical to SEQ ID NO: 13
  REGION 1..115: note = Synthetic Peptide

SEQ ID NO: 353 - protein, 114 aa, synthetic construct; identical to SEQ ID NO: 14
  REGION 1..114: note = Synthetic Peptide

SEQ ID NO: 354 - protein, 445 aa, synthetic construct
  REGION 1..445: note = Synthetic Peptide
EVQLVESGGGLVKPGGSLRLSCAASGFTFSNARMGWVRQAPGKGLEWVGRIKSKTEGGTRDYAAPVKGRFTISRDDSKNTLYLQMNSLKTEDTAVYYCTSYSGVWGQGTMVTVSSASTKGPSVFPLAPSSKSTSGGTAALGCLVKDYFPEPVTVSWNSGALTSGVHTFPAVLQSSGLYSLSSVVTVPSSSLGTQTYICNVNHKPSNTKVDKKVEPKSCDKTHTCPPCPAPELLGGPSVFLFPPKPKDTLMISRTPEVTCVVVDVSHEDPEVKFNWYVDGVEVHNAKTKPREEQYNSTYRVVSVLTVLHQDWLNGKEYKCKVSNKALPAPIEKTISKAKGQPREPQVYTLPPSREEMTKNQVSLTCLVKGFYPSDIAVEWESNGQPENNYKTTPPVLDSDGSFFLYSKLTVDKSRWQQGNVFSCSVMHEALHNHYTQKSLSLSPGK

SEQ ID NO: 355 - protein, 220 aa, synthetic construct; identical to SEQ ID NO: 16
  REGION 1..220: note = Synthetic Peptide

SEQ ID NO: 356 - protein, 5 aa, synthetic construct
  REGION 1..5: note = Synthetic Peptide
NARMG

SEQ ID NO: 357 - protein, 19 aa, synthetic construct
  REGION 1..19: note = Synthetic Peptide
RIKSKTEGGTRDYAAPVKG

SEQ ID NO: 358 - protein, 4 aa, synthetic construct
  REGION 1..4: note = Synthetic Peptide
YSGV

SEQ ID NO: 359 - protein, 17 aa, synthetic construct
  REGION 1..17: note = Synthetic Peptide
KSSQSVLYSSNNKNYLA

SEQ ID NO: 360 - protein, 7 aa, synthetic construct
  REGION 1..7: note = Synthetic Peptide
WASTRES

SEQ ID NO: 361 - protein, 9 aa, synthetic construct
  REGION 1..9: note = Synthetic Peptide
QQYYSIPIT

SEQ ID NO: 362 - protein, 115 aa, synthetic construct; identical to SEQ ID NO: 13
  REGION 1..115: note = Synthetic Peptide

SEQ ID NO: 363 - protein, 114 aa, synthetic construct
  REGION 1..114: note = Synthetic Peptide
DIVMTQSPDSLAVSLGERATINCKSSQSVLYSSNNKNYLAWYQQKPGQPPKLLISWASTRESGVPDRFSGSGSGTDFTLTINSLQAEDVAVYYCQQYYSIPITFGGGTKVEIKR

SEQ ID NO: 364 - protein, 445 aa, synthetic construct; identical to SEQ ID NO: 354
  REGION 1..445: note = Synthetic Peptide

SEQ ID NO: 365 - protein, 220 aa, synthetic construct
  REGION 1..220: note = Synthetic Peptide
DIVMTQSPDSLAVSLGERATINCKSSQSVLYSSNNKNYLAWYQQKPGQPPKLLISWASTRESGVPDRFSGSGSGTDFTLTINSLQAEDVAVYYCQQYYSIPITFGGGTKVEIKRTVAAPSVFIFPPSDEQLKSGTASVVCLLNNFYPREAKVQWKVDNALQSGNSQESVTEQDSKDSTYSLSSTLTLSKADYEKHKVYACEVTHQGLSSPVTKSFNRGEC

SEQ ID NO: 366 - protein, 5 aa, synthetic construct
  REGION 1..5: note = Synthetic Peptide
NYGMH

SEQ ID NO: 367 - protein, 17 aa, synthetic construct
  REGION 1..17: note = Synthetic Peptide
VISYDGSNKFYIRSVKG

SEQ ID NO: 368 - protein, 9 aa, synthetic construct
  REGION 1..9: note = Synthetic Peptide
AGGIGRFDY

SEQ ID NO: 369 - protein, 16 aa, synthetic construct
  REGION 1..16: note = Synthetic Peptide
KAAQSLLHSDGKTYLF

SEQ ID NO: 370 - protein, 7 aa, synthetic construct
  REGION 1..7: note = Synthetic Peptide
EVSNRFS

SEQ ID NO: 371 - protein, 9 aa, synthetic construct
  REGION 1..9: note = Synthetic Peptide
MQTLKLPLT

SEQ ID NO: 372 - protein, 118 aa, synthetic construct
  REGION 1..118: note = Synthetic Peptide
QVQLVESGGGVVQPGRSLRLSCAASGFTFSNYGMHWVRQAPGKGLEWVAVISYDGSNKFYIRSVKGRFTISRDNSKNTLYLQMNSLRAEDTAVYYCARAGGIGRFDYWGQGTLVTVSS

SEQ ID NO: 373 - protein, 113 aa, synthetic construct
  REGION 1..113: note = Synthetic Peptide
DIVMTQTPLSLSVTPGQPASISCKAAQSLLHSDGKTYLFWYLQKPGQSPQLLIYEVSNRFSGVPDRFSGSGSGTDFTLKISRVEAEDVGVYYCMQTLKLPLTFGGGTKVEIKR

SEQ ID NO: 374 - protein, 448 aa, synthetic construct
  REGION 1..448: note = Synthetic Peptide
QVQLVESGGGVVQPGRSLRLSCAASGFTFSNYGMHWVRQAPGKGLEWVAVISYDGSNKFYIRSVKGRFTISRDNSKNTLYLQMNSLRAEDTAVYYCARAGGIGRFDYWGQGTLVTVSSASTKGPSVFPLAPSSKSTSGGTAALGCLVKDYFPEPVTVSWNSGALTSGVHTFPAVLQSSGLYSLSSVVTVPSSSLGTQTYICNVNHKPSNTKVDKKVEPKSCDKTHTCPPCPAPELLGGPSVFLFPPKPKDTLMISRTPEVTCVVVDVSHEDPEVKFNWYVDGVEVHNAKTKPREEQYNSTYRVVSVLTVLHQDWLNGKEYKCKVSNKALPAPIEKTISKAKGQPREPQVYTLPPSREEMTKNQVSLTCLVKGFYPSDIAVEWESNGQPENNYKTTPPVLDSDGSFFLYSKLTVDKSRWQQGNVFSCSVMHEALHNHYTQKSLSLSPGK

SEQ ID NO: 375 - protein, 219 aa, synthetic construct
  REGION 1..219: note = Synthetic Peptide
DIVMTQTPLSLSVTPGQPASISCKAAQSLLHSDGKTYLFWYLQKPGQSPQLLIYEVSNRFSGVPDRFSGSGSGTDFTLKISRVEAEDVGVYYCMQTLKLPLTFGGGTKVEIKRTVAAPSVFIFPPSDEQLKSGTASVVCLLNNFYPREAKVQWKVDNALQSGNSQESVTEQDSKDSTYSLSSTLTLSKADYEKHKVYACEVTHQGLSSPVTKSFNRGEC

SEQ ID NO: 376 - protein, 5 aa, synthetic construct
  REGION 1..5: note = Synthetic Peptide
NYGMH

SEQ ID NO: 377 - protein, 17 aa, synthetic construct
  REGION 1..17: note = Synthetic Peptide
VISYDGSNKFYLKSVKG

SEQ ID NO: 378 - protein, 9 aa, synthetic construct
  REGION 1..9: note = Synthetic Peptide
AGGIGRFDY

SEQ ID NO: 379 - protein, 16 aa, synthetic construct
  REGION 1..16: note = Synthetic Peptide
KASQSLLHSDGKTYLF

SEQ ID NO: 380 - protein, 7 aa, synthetic construct
  REGION 1..7: note = Synthetic Peptide
EVSNRFS

SEQ ID NO: 381 - protein, 9 aa, synthetic construct
  REGION 1..9: note = Synthetic Peptide
MQTLKLPLT

SEQ ID NO: 382 - protein, 118 aa, synthetic construct
  REGION 1..118: note = Synthetic Peptide
QVQLVESGGGVVQPGRSLRLSCAASGFTFSNYGMHWVRQAPGKGLEWVAVISYDGSNKFYLKSVKGRFTISRDNSKNTLYLQMNSLRAEDTAVYYCARAGGIGRFDYWGQGTLVTVSS

SEQ ID NO: 383 - protein, 113 aa, synthetic construct
  REGION 1..113: note = Synthetic Peptide
DIVMTQTPLSLSVTPGQPASISCKASQSLLHSDGKTYLFWYLQKPGQSPQLLIYEVSNRFSGVPDRFSGSGSGTDFTLKISRVEAEDVGVYYCMQTLKLPLTFGGGTKVEIKR

SEQ ID NO: 384 - protein, 448 aa, synthetic construct
  REGION 1..448: note = Synthetic Peptide
QVQLVESGGGVVQPGRSLRLSCAASGFTFSNYGMHWVRQAPGKGLEWVAVISYDGSNKFYLKSVKGRFTISRDNSKNTLYLQMNSLRAEDTAVYYCARAGGIGRFDYWGQGTLVTVSSASTKGPSVFPLAPSSKSTSGGTAALGCLVKDYFPEPVTVSWNSGALTSGVHTFPAVLQSSGLYSLSSVVTVPSSSLGTQTYICNVNHKPSNTKVDKKVEPKSCDKTHTCPPCPAPELLGGPSVFLFPPKPKDTLMISRTPEVTCVVVDVSHEDPEVKFNWYVDGVEVHNAKTKPREEQYNSTYRVVSVLTVLHQDWLNGKEYKCKVSNKALPAPIEKTISKAKGQPREPQVYTLPPSREEMTKNQVSLTCLVKGFYPSDIAVEWESNGQPENNYKTTPPVLDSDGSFFLYSKLTVDKSRWQQGNVFSCSVMHEALHNHYTQKSLSLSPGK

SEQ ID NO: 385 - protein, 219 aa, synthetic construct
  REGION 1..219: note = Synthetic Peptide
DIVMTQTPLSLSVTPGQPASISCKASQSLLHSDGKTYLFWYLQKPGQSPQLLIYEVSNRFSGVPDRFSGSGSGTDFTLKISRVEAEDVGVYYCMQTLKLPLTFGGGTKVEIKRTVAAPSVFIFPPSDEQLKSGTASVVCLLNNFYPREAKVQWKVDNALQSGNSQESVTEQDSKDSTYSLSSTLTLSKADYEKHKVYACEVTHQGLSSPVTKSFNRGEC

SEQ ID NO: 386 - protein, 5 aa, synthetic construct
  REGION 1..5: note = Synthetic Peptide
NAWMS

SEQ ID NO: 387 - protein, 19 aa, synthetic construct
  REGION 1..19: note = Synthetic Peptide
RIKRRTDGGTTDYAAPVKD

SEQ ID NO: 388 - protein, 11 aa, synthetic construct
  REGION 1..11: note = Synthetic Peptide
VTMVRGVIADY

SEQ ID NO: 389 - protein, 12 aa, synthetic construct
  REGION 1..12: note = Synthetic Peptide
RASQSVSSGSLA

SEQ ID NO: 390 - protein, 7 aa, synthetic construct
  REGION 1..7: note = Synthetic Peptide
GASSRAT

SEQ ID NO: 391 - protein, 8 aa, synthetic construct
  REGION 1..8: note = Synthetic Peptide
QQYGSSRT

SEQ ID NO: 392 - protein, 122 aa, synthetic construct
  REGION 1..122: note = Synthetic Peptide
EVQLVESGGGLVKPGGSLRLSCAASGFIFSNAWMSWVRQAPGKGLEWVARIKRRTDGGTTDYAAPVKDRFTISRDDSKNTLFLQMNSLKTEDTAVYYCTTVTMVRGVIADYWGQGTLVTVSS

SEQ ID NO: 393 - protein, 108 aa, synthetic construct
  REGION 1..108: note = Synthetic Peptide
EIVLTQSPGTLSLSPGERATLSCRASQSVSSGSLAWYQQKLGQAPRLLIYGASSRATGIPDRFSGSGSGTDFTLTISSLEPEDFAVYYCQQYGSSRTFGQGTKVELKR

SEQ ID NO: 394 - protein, 452 aa, synthetic construct
  REGION 1..452: note = Synthetic Peptide
EVQLVESGGGLVKPGGSLRLSCAASGFIFSNAWMSWVRQAPGKGLEWVARIKRRTDGGTTDYAAPVKDRFTISRDDSKNTLFLQMNSLKTEDTAVYYCTTVTMVRGVIADYWGQGTLVTVSSASTKGPSVFPLAPSSKSTSGGTAALGCLVKDYFPEPVTVSWNSGALTSGVHTFPAVLQSSGLYSLSSVVTVPSSSLGTQTYICNVNHKPSNTKVDKKVEPKSCDKTHTCPPCPAPELLGGPSVFLFPPKPKDTLMISRTPEVTCVVVDVSHEDPEVKFNWYVDGVEVHNAKTKPREEQYNSTYRVVSVLTVLHQDWLNGKEYKCKVSNKALPAPIEKTISKAKGQPREPQVYTLPPSREEMTKNQVSLTCLVKGFYPSDIAVEWESNGQPENNYKTTPPVLDSDGSFFLYSKLTVDKSRWQQGNVFSCSVMHEALHNHYTQKSLSLSPGK

SEQ ID NO: 395 - protein, 214 aa, synthetic construct
  REGION 1..214: note = Synthetic Peptide
EIVLTQSPGTLSLSPGERATLSCRASQSVSSGSLAWYQQKLGQAPRLLIYGASSRATGIPDRFSGSGSGTDFTLTISSLEPEDFAVYYCQQYGSSRTFGQGTKVELKRTVAAPSVFIFPPSDEQLKSGTASVVCLLNNFYPREAKVQWKVDNALQSGNSQESVTEQDSKDSTYSLSSTLTLSKADYEKHKVYACEVTHQGLSSPVTKSFNRGEC

SEQ ID NO: 396 - protein, 5 aa, synthetic construct
  REGION 1..5: note = Synthetic Peptide
NAWMS

SEQ ID NO: 397 - protein, 19 aa, synthetic construct
  REGION 1..19: note = Synthetic Peptide
RIKRKTDGGTTDYAAPVKG

SEQ ID NO: 398 - protein, 11 aa, synthetic construct
  REGION 1..11: note = Synthetic Peptide
VTLVRGIIFDY

SEQ ID NO: 399 - protein, 12 aa, synthetic construct
  REGION 1..12: note = Synthetic Peptide
RVSQSVSSSQLA

SEQ ID NO: 400 - protein, 7 aa, synthetic construct
  REGION 1..7: note = Synthetic Peptide
GASSRAT

SEQ ID NO: 401 - protein, 8 aa, synthetic construct
  REGION 1..8: note = Synthetic Peptide
QQYGNSRT

SEQ ID NO: 402 - protein, 122 aa, synthetic construct
  REGION 1..122: note = Synthetic Peptide
EVQLVESGGGLVKPGGSLRLSCAASGFIFSNAWMSWVRQAPGKGLEWVGRIKRKTDGGTTDYAAPVKGRFTISRDDSKNTLYLLMNSLKIEDTAVYYCTVVTLVRGIIFDYWGQGTLVTVSS

SEQ ID NO: 403 - protein, 108 aa, synthetic construct
  REGION 1..108: note = Synthetic Peptide
EIVLTQSPGTLSLSPGESATLSCRVSQSVSSSQLAWYQQKPGQAPRLLIYGASSRATGIPDRFSGSGSGTDFTLTISRLEPEDFAVYYCQQYGNSRTFGQGTKVEIKR

SEQ ID NO: 404 - protein, 452 aa, synthetic construct
  REGION 1..452: note = Synthetic Peptide
EVQLVESGGGLVKPGGSLRLSCAASGFIFSNAWMSWVRQAPGKGLEWVGRIKRKTDGGTTDYAAPVKGRFTISRDDSKNTLYLLMNSLKIEDTAVYYCTVVTLVRGIIFDYWGQGTLVTVSSASTKGPSVFPLAPSSKSTSGGTAALGCLVKDYFPEPVTVSWNSGALTSGVHTFPAVLQSSGLYSLSSVVTVPSSSLGTQTYICNVNHKPSNTKVDKKVEPKSCDKTHTCPPCPAPELLGGPSVFLFPPKPKDTLMISRTPEVTCVVVDVSHEDPEVKFNWYVDGVEVHNAKTKPREEQYNSTYRVVSVLTVLHQDWLNGKEYKCKVSNKALPAPIEKTISKAKGQPREPQVYTLPPSREEMTKNQVSLTCLVKGFYPSDIAVEWESNGQPENNYKTTPPVLDSDGSFFLYSKLTVDKSRWQQGNVFSCSVMHEALHNHYTQKSLSLSPGK

SEQ ID NO: 405 - protein, 214 aa, synthetic construct
  REGION 1..214: note = Synthetic Peptide
EIVLTQSPGTLSLSPGESATLSCRVSQSVSSSQLAWYQQKPGQAPRLLIYGASSRATGIPDRFSGSGSGTDFTLTISRLEPEDFAVYYCQQYGNSRTFGQGTKVEIKRTVAAPSVFIFPPSDEQLKSGTASVVCLLNNFYPREAKVQWKVDNALQSGNSQESVTEQDSKDSTYSLSSTLTLSKADYEKHKVYACEVTHQGLSSPVTKSFNRGEC

SEQ ID NO: 406 - protein, 5 aa, synthetic construct
  REGION 1..5: note = Synthetic Peptide
NAWLQ

SEQ ID NO: 407 - protein, 19 aa, synthetic construct
  REGION 1..19: note = Synthetic Peptide
RIKRKTDQLTTDYAAPVKG

SEQ ID NO: 408 - protein, 11 aa, synthetic construct
  REGION 1..11: note = Synthetic Peptide
VTRSRGIIFDY

SEQ ID NO: 409 - protein, 12 aa, synthetic construct
  REGION 1..12: note = Synthetic Peptide
RVSQSVSSSQLA

SEQ ID NO: 410 - protein, 7 aa, synthetic construct
  REGION 1..7: note = Synthetic Peptide
GASSRAT

SEQ ID NO: 411 - protein, 8 aa, synthetic construct
  REGION 1..8: note = Synthetic Peptide
QQYGNPRT

SEQ ID NO: 412 - protein, 122 aa, synthetic construct
  REGION 1..122: note = Synthetic Peptide
EVQLVESGGGLVKPGGSLRLSCAASGFIFSNAWLQWVRQAPGKGLEWVGRIKRKTDQLTTDYAAPVKGRFTISRDDSKNTLYLLMNSLKIEDTAVYYCTVVTRSRGIIFDYWGQGTLVTVSS

SEQ ID NO: 413 - protein, 108 aa, synthetic construct
  REGION 1..108: note = Synthetic Peptide
EIVLTQSPGTLSLSPGESATLSCRVSQSVSSSQLAWYQQKPGQAPRLLIYGASSRATGIPDRFSGSGSGTDFTLTISRLEPEDFAVYYCQQYGNPRTFGQGTKVEIKR

SEQ ID NO: 414 - protein, 452 aa, synthetic construct
  REGION 1..452: note = Synthetic Peptide
EVQLVESGGGLVKPGGSLRLSCAASGFIFSNAWLQWVRQAPGKGLEWVGRIKRKTDQLTTDYAAPVKGRFTISRDDSKNTLYLLMNSLKIEDTAVYYCTVVTRSRGIIFDYWGQGTLVTVSSASTKGPSVFPLAPSSKSTSGGTAALGCLVKDYFPEPVTVSWNSGALTSGVHTFPAVLQSSGLYSLSSVVTVPSSSLGTQTYICNVNHKPSNTKVDKKVEPKSCDKTHTCPPCPAPELLGGPSVFLFPPKPKDTLMISRTPEVTCVVVDVSHEDPEVKFNWYVDGVEVHNAKTKPREEQYNSTYRVVSVLTVLHQDWLNGKEYKCKVSNKALPAPIEKTISKAKGQPREPQVYTLPPSREEMTKNQVSLTCLVKGFYPSDIAVEWESNGQPENNYKTTPPVLDSDGSFFLYSKLTVDKSRWQQGNVFSCSVMHEALHNHYTQKSLSLSPGK

SEQ ID NO: 415 - protein, 214 aa, synthetic construct
  REGION 1..214: note = Synthetic Peptide
EIVLTQSPGTLSLSPGESATLSCRVSQSVSSSQLAWYQQKPGQAPRLLIYGASSRATGIPDRFSGSGSGTDFTLTISRLEPEDFAVYYCQQYGNPRTFGQGTKVEIKRTVAAPSVFIFPPSDEQLKSGTASVVCLLNNFYPREAKVQWKVDNALQSGNSQESVTEQDSKDSTYSLSSTLTLSKADYEKHKVYACEVTHQGLSSPVTKSFNRGEC

SEQ ID NO: 416 - protein, 5 aa, synthetic construct
  REGION 1..5: note = Synthetic Peptide
NAWLQ

SEQ ID NO: 417 - protein, 19 aa, synthetic construct
  REGION 1..19: note = Synthetic Peptide
RIKRKTDASTTDYAAPVKG

SEQ ID NO: 418 - protein, 11 aa, synthetic construct
  REGION 1..11: note = Synthetic Peptide
VTRSRGIIFDY

SEQ ID NO: 419 - protein, 12 aa, synthetic construct
  REGION 1..12: note = Synthetic Peptide
RVSQSVSSSQLA

SEQ ID NO: 420 - protein, 7 aa, synthetic construct
  REGION 1..7: note = Synthetic Peptide
GASSRAT

SEQ ID NO: 421 - protein, 8 aa, synthetic construct
  REGION 1..8: note = Synthetic Peptide
QQYGNPRT

SEQ ID NO: 422 - protein, 122 aa, synthetic construct
  REGION 1..122: note = Synthetic Peptide
EVQLVESGGGLVKPGGSLRLSCAASGFIFSNAWLQWVRQAPGKGLEWVGRIKRKTDASTTDYAAPVKGRFTISRDDSKNTLYLLMNSLKIEDTAVYYCTVVTRSRGIIFDYWGQGTLVTVSS

SEQ ID NO: 423 - protein, 108 aa, synthetic construct; identical to SEQ ID NO: 413
  REGION 1..108: note = Synthetic Peptide

SEQ ID NO: 424 - protein, 452 aa, synthetic construct
  REGION 1..452: note = Synthetic Peptide
EVQLVESGGGLVKPGGSLRLSCAASGFIFSNAWLQWVRQAPGKGLEWVGRIKRKTDASTTDYAAPVKGRFTISRDDSKNTLYLLMNSLKIEDTAVYYCTVVTRSRGIIFDYWGQGTLVTVSSASTKGPSVFPLAPSSKSTSGGTAALGCLVKDYFPEPVTVSWNSGALTSGVHTFPAVLQSSGLYSLSSVVTVPSSSLGTQTYICNVNHKPSNTKVDKKVEPKSCDKTHTCPPCPAPELLGGPSVFLFPPKPKDTLMISRTPEVTCVVVDVSHEDPEVKFNWYVDGVEVHNAKTKPREEQYNSTYRVVSVLTVLHQDWLNGKEYKCKVSNKALPAPIEKTISKAKGQPREPQVYTLPPSREEMTKNQVSLTCLVKGFYPSDIAVEWESNGQPENNYKTTPPVLDSDGSFFLYSKLTVDKSRWQQGNVFSCSVMHEALHNHYTQKSLSLSPGK

SEQ ID NO: 425 - protein, 214 aa, synthetic construct; identical to SEQ ID NO: 415
  REGION 1..214: note = Synthetic Peptide

SEQ ID NO: 426 - protein, 5 aa, synthetic construct
  REGION 1..5: note = Synthetic Peptide
SYGMH

SEQ ID NO: 427 - protein, 17 aa, synthetic construct
  REGION 1..17: note = Synthetic Peptide
VISYDGSNKYYADSVKG

SEQ ID NO: 428 - protein, 11 aa, synthetic construct
  REGION 1..11: note = Synthetic Peptide
GRYFDWFLFDY

SEQ ID NO: 429 - protein, 16 aa, synthetic construct
  REGION 1..16: note = Synthetic Peptide
KSSQSLLHSDGKTYLF

SEQ ID NO: 430 - protein, 7 aa, synthetic construct
  REGION 1..7: note = Synthetic Peptide
EVSNRFS

SEQ ID NO: 431 - protein, 9 aa, synthetic construct
  REGION 1..9: note = Synthetic Peptide
MQSLRLPLT

SEQ ID NO: 432 - protein, 120 aa, synthetic construct
  REGION 1..120: note = Synthetic Peptide
QVQLVESGGGVVQPGRSLRLSCAASGFTFSSYGMHWVRQAPGKGLEWVAVISYDGSNKYYADSVKGRFTISRDNSKNTLYLQMNSLRAEDTAVYYCARGRYFDWFLFDYWGQGTLVTVSS

SEQ ID NO: 433 - protein, 113 aa, synthetic construct
  REGION 1..113: note = Synthetic Peptide
DTVMTQTPLSLSVTPGQPASISCKSSQSLLHSDGKTYLFWYLQKPGQPPQLLISEVSNRFSGVPDRFSGSGSGTDFTLKISRVEAEDVGFYYCMQSLRLPLTFGGGTKVEIKR

SEQ ID NO: 434 - protein, 450 aa, synthetic construct
  REGION 1..450: note = Synthetic Peptide
QVQLVESGGGVVQPGRSLRLSCAASGFTFSSYGMHWVRQAPGKGLEWVAVISYDGSNKYYADSVKGRFTISRDNSKNTLYLQMNSLRAEDTAVYYCARGRYFDWFLFDYWGQGTLVTVSSASTKGPSVFPLAPSSKSTSGGTAALGCLVKDYFPEPVTVSWNSGALTSGVHTFPAVLQSSGLYSLSSVVTVPSSSLGTQTYICNVNHKPSNTKVDKKVEPKSCDKTHTCPPCPAPELLGGPSVFLFPPKPKDTLMISRTPEVTCVVVDVSHEDPEVKFNWYVDGVEVHNAKTKPREEQYNSTYRVVSVLTVLHQDWLNGKEYKCKVSNKALPAPIEKTISKAKGQPREPQVYTLPPSREEMTKNQVSLTCLVKGFYPSDIAVEWESNGQPENNYKTTPPVLDSDGSFFLYSKLTVDKSRWQQGNVFSCSVMHEALHNHYTQKSLSLSPGK

SEQ ID NO: 435 - protein, 219 aa, synthetic construct
  REGION 1..219: note = Synthetic Peptide
DTVMTQTPLSLSVTPGQPASISCKSSQSLLHSDGKTYLFWYLQKPGQPPQLLISEVSNRFSGVPDRFSGSGSGTDFTLKISRVEAEDVGFYYCMQSLRLPLTFGGGTKVEIKRTVAAPSVFIFPPSDEQLKSGTASVVCLLNNFYPREAKVQWKVDNALQSGNSQESVTEQDSKDSTYSLSSTLTLSKADYEKHKVYACEVTHQGLSSPVTKSFNRGEC

SEQ ID NO: 436 - protein, 5 aa, synthetic construct
  REGION 1..5: note = Synthetic Peptide
SYGMH

SEQ ID NO: 437 - protein, 17 aa, synthetic construct
  REGION 1..17: note = Synthetic Peptide
VISYDGSNKYYADSVKG

SEQ ID NO: 438 - protein, 11 aa, synthetic construct
  REGION 1..11: note = Synthetic Peptide
GRYFDWTLFDY

SEQ ID NO: 439 - protein, 16 aa, synthetic construct
  REGION 1..16: note = Synthetic Peptide
KSSQSLLHRDGKTYLF

SEQ ID NO: 440 - protein, 7 aa, synthetic construct
  REGION 1..7: note = Synthetic Peptide
EVSNRFS

SEQ ID NO: 441 - protein, 9 aa, synthetic construct
  REGION 1..9: note = Synthetic Peptide
MQSLRLPLT

SEQ ID NO: 442 - protein, 120 aa, synthetic construct
  REGION 1..120: note = Synthetic Peptide
QVQLVESGGGVVQPGRSLRLSCAASGFTFSSYGMHWVRQAPGKGLEWVAVISYDGSNKYYADSVKGRFTISRDNSKNTLYLQMNSLRAEDTAVYYCARGRYFDWTLFDYWGQGTLVTVSS

SEQ ID NO: 443 - protein, 113 aa, synthetic construct
  REGION 1..113: note = Synthetic Peptide
DTVMTQTPLSLSVTPGQPASISCKSSQSLLHRDGKTYLFWYLQKPGQPPQLLIYEVSNRFSGVPDRFSGSGSGTDFTLKISRVEAEDVGVYYCMQSLRLPLTFGGGTKVEIKR

SEQ ID NO: 444 - protein, 450 aa, synthetic construct
  REGION 1..450: note = Synthetic Peptide
QVQLVESGGGVVQPGRSLRLSCAASGFTFSSYGMHWVRQAPGKGLEWVAVISYDGSNKYYADSVKGRFTISRDNSKNTLYLQMNSLRAEDTAVYYCARGRYFDWTLFDYWGQGTLVTVSSASTKGPSVFPLAPSSKSTSGGTAALGCLVKDYFPEPVTVSWNSGALTSGVHTFPAVLQSSGLYSLSSVVTVPSSSLGTQTYICNVNHKPSNTKVDKKVEPKSCDKTHTCPPCPAPELLGGPSVFLFPPKPKDTLMISRTPEVTCVVVDVSHEDPEVKFNWYVDGVEVHNAKTKPREEQYNSTYRVVSVLTVLHQDWLNGKEYKCKVSNKALPAPIEKTISKAKGQPREPQVYTLPPSREEMTKNQVSLTCLVKGFYPSDIAVEWESNGQPENNYKTTPPVLDSDGSFFLYSKLTVDKSRWQQGNVFSCSVMHEALHNHYTQKSLSLSPGK

SEQ ID NO: 445 - protein, 219 aa, synthetic construct
  REGION 1..219: note = Synthetic Peptide
DTVMTQTPLSLSVTPGQPASISCKSSQSLLHRDGKTYLFWYLQKPGQPPQLLIYEVSNRFSGVPDRFSGSGSGTDFTLKISRVEAEDVGVYYCMQSLRLPLTFGGGTKVEIKRTVAAPSVFIFPPSDEQLKSGTASVVCLLNNFYPREAKVQWKVDNALQSGNSQESVTEQDSKDSTYSLSSTLTLSKADYEKHKVYACEVTHQGLSSPVTKSFNRGEC

SEQ ID NO: 446 - protein, 5 aa, synthetic construct
  REGION 1..5: note = Synthetic Peptide
SYPMH

SEQ ID NO: 447 - protein, 17 aa, synthetic construct
  REGION 1..17: note = Synthetic Peptide
VISYDGSNKYYADSVKG

SEQ ID NO: 448 - protein, 11 aa, synthetic construct
  REGION 1..11: note = Synthetic Peptide
GRYFDWTLFDY

SEQ ID NO: 449 - protein, 16 aa, synthetic construct
  REGION 1..16: note = Synthetic Peptide
KSSQSLLHSDGKTYLF

SEQ ID NO: 450 - protein, 7 aa, synthetic construct
  REGION 1..7: note = Synthetic Peptide
LRSNRFS

SEQ ID NO: 451 - protein, 9 aa, synthetic construct
  REGION 1..9: note = Synthetic Peptide
MQSLRLPLT

SEQ ID NO: 452 - protein, 120 aa, synthetic construct
  REGION 1..120: note = Synthetic Peptide
QVQLVESGGGVVQPGRSLRLSCAASGFTFSSYPMHWVRQAPGKGLEWVAVISYDGSNKYYADSVKGRFTISRDNSKNTLYLQMNSLRAEDTAVYYCARGRYFDWTLFDYWGQGTLVTVSS

SEQ ID NO: 453 - protein, 113 aa, synthetic construct
  REGION 1..113: note = Synthetic Peptide
DTVMTQTPLSLSVTPGQPASISCKSSQSLLHSDGKTYLFWYLQKPGQPPQLLIYLRSNRFSGVPDRFSGSGSGTDFTLKISRVEAEDVGVYYCMQSLRLPLTFGGGTKVEIKR

SEQ ID NO: 454 - protein, 450 aa, synthetic construct
  REGION 1..450: note = Synthetic Peptide
QVQLVESGGGVVQPGRSLRLSCAASGFTFSSYPMHWVRQAPGKGLEWVAVISYDGSNKYYADSVKGRFTISRDNSKNTLYLQMNSLRAEDTAVYYCARGRYFDWTLFDYWGQGTLVTVSSASTKGPSVFPLAPSSKSTSGGTAALGCLVKDYFPEPVTVSWNSGALTSGVHTFPAVLQSSGLYSLSSVVTVPSSSLGTQTYICNVNHKPSNTKVDKKVEPKSCDKTHTCPPCPAPELLGGPSVFLFPPKPKDTLMISRTPEVTCVVVDVSHEDPEVKFNWYVDGVEVHNAKTKPREEQYNSTYRVVSVLTVLHQDWLNGKEYKCKVSNKALPAPIEKTISKAKGQPREPQVYTLPPSREEMTKNQVSLTCLVKGFYPSDIAVEWESNGQPENNYKTTPPVLDSDGSFFLYSKLTVDKSRWQQGNVFSCSVMHEALHNHYTQKSLSLSPGK

SEQ ID NO: 455 - protein, 219 aa, synthetic construct
  REGION 1..219: note = Synthetic Peptide
DTVMTQTPLSLSVTPGQPASISCKSSQSLLHSDGKTYLFWYLQKPGQPPQLLIYLRSNRFSGVPDRFSGSGSGTDFTLKISRVEAEDVGVYYCMQSLRLPLTFGGGTKVEIKRTVAAPSVFIFPPSDEQLKSGTASVVCLLNNFYPREAKVQWKVDNALQSGNSQESVTEQDSKDSTYSLSSTLTLSKADYEKHKVYACEVTHQGLSSPVTKSFNRGEC

SEQ ID NO: 456 - protein, 5 aa, synthetic construct
  REGION 1..5: note = Synthetic Peptide
SYGMH

SEQ ID NO: 457 - protein, 17 aa, synthetic construct
  REGION 1..17: note = Synthetic Peptide
VISYDGSNKYYSRSVKG

SEQ ID NO: 458 - protein, 11 aa, synthetic construct
  REGION 1..11: note = Synthetic Peptide
GRYFDWFLFDY

SEQ ID NO: 459 - protein, 16 aa, synthetic construct
  REGION 1..16: note = Synthetic Peptide
KSSQSLLHSDGKTYLF

SEQ ID NO: 460 - protein, 7 aa, synthetic construct
  REGION 1..7: note = Synthetic Peptide
LSSNRFS

SEQ ID NO: 461 - protein, 9 aa, synthetic construct
  REGION 1..9: note = Synthetic Peptide
MQSLRLPLT

SEQ ID NO: 462 - protein, 129 aa, synthetic construct
  REGION 1..129: note = Synthetic Peptide
MQSLRLPLTQVQLVESGGGVVQPGRSLRLSCAASGFTFSSYGMHWVRQAPGKGLEWVAVISYDGSNKYYSRSVKGRFTISRDNSKNTLYLQMNSLRAEDTAVYYCARGRYFDWFLFDYWGQGTLVTVSS

SEQ ID NO: 463 - protein, 113 aa, synthetic construct
  REGION 1..113: note = Synthetic Peptide
DTVMTQTPLSLSVTPGQPASISCKSSQSLLHSDGKTYLFWYLQKPGQPPQLLIYLSSNRFSGVPDRFSGSGSGTDFTLKISRVEAEDVGVYYCMQSLRLPLTFGGGTKVEIKR

SEQ ID NO: 464 - protein, 450 aa, synthetic construct
  REGION 1..450: note = Synthetic Peptide
QVQLVESGGGVVQPGRSLRLSCAASGFTFSSYGMHWVRQAPGKGLEWVAVISYDGSNKYYSRSVKGRFTISRDNSKNTLYLQMNSLRAEDTAVYYCARGRYFDWFLFDYWGQGTLVTVSSASTKGPSVFPLAPSSKSTSGGTAALGCLVKDYFPEPVTVSWNSGALTSGVHTFPAVLQSSGLYSLSSVVTVPSSSLGTQTYICNVNHKPSNTKVDKKVEPKSCDKTHTCPPCPAPELLGGPSVFLFPPKPKDTLMISRTPEVTCVVVDVSHEDPEVKFNWYVDGVEVHNAKTKPREEQYNSTYRVVSVLTVLHQDWLNGKEYKCKVSNKALPAPIEKTISKAKGQPREPQVYTLPPSREEMTKNQVSLTCLVKGFYPSDIAVEWESNGQPENNYKTTPPVLDSDGSFFLYSKLTVDKSRWQQGNVFSCSVMHEALHNHYTQKSLSLSPGK

SEQ ID NO: 465 - protein, 219 aa, synthetic construct
  REGION 1..219: note = Synthetic Peptide
DTVMTQTPLSLSVTPGQPASISCKSSQSLLHSDGKTYLFWYLQKPGQPPQLLIYLSSNRFSGVPDRFSGSGSGTDFTLKISRVEAEDVGVYYCMQSLRLPLTFGGGTKVEIKRTVAAPSVFIFPPSDEQLKSGTASVVCLLNNFYPREAKVQWKVDNALQSGNSQESVTEQDSKDSTYSLSSTLTLSKADYEKHKVYACEVTHQGLSSPVTKSFNRGEC

SEQ ID NO: 466 - protein, 5 aa, synthetic construct
  REGION 1..5: note = Synthetic Peptide
SYAMH

SEQ ID NO: 467 - protein, 17 aa, synthetic construct
  REGION 1..17: note = Synthetic Peptide
VISYDGSNKYYADSVKG

SEQ ID NO: 468 - protein, 11 aa, synthetic construct
  REGION 1..11: note = Synthetic Peptide
GRYFDWFLFDY

SEQ ID NO: 469 - protein, 16 aa, synthetic construct
  REGION 1..16: note = Synthetic Peptide
KSSQSLLHSDGKTYLF

SEQ ID NO: 470 - protein, 7 aa, synthetic construct
  REGION 1..7: note = Synthetic Peptide
LTSNRFS

SEQ ID NO: 471 - protein, 9 aa, synthetic construct
  REGION 1..9: note = Synthetic Peptide
MQSLRLPLT

SEQ ID NO: 472 - protein, 120 aa, synthetic construct
  REGION 1..120: note = Synthetic Peptide
QVQLVESGGGVVQPGRSLRLSCAASGFTFSSYAMHWVRQAPGKGLEWVAVISYDGSNKYYADSVKGRFTISRDNSKNTLYLQMNSLRAEDTAVYYCARGRYFDWFLFDYWGQGTLVTVSS

SEQ ID NO: 473 - protein, 113 aa, synthetic construct
  REGION 1..113: note = Synthetic Peptide
DTVMTQTPLSLSVTPGQPASISCKSSQSLLHSDGKTYLFWYLQKPGQPPQLLIYLTSNRFSGVPDRFSGSGSGTDFTLKISRVEAEDVGVYYCMQSLRLPLTFGGGTKVEIKR

SEQ ID NO: 474 - protein, 450 aa, synthetic construct
  REGION 1..450: note = Synthetic Peptide
QVQLVESGGGVVQPGRSLRLSCAASGFTFSSYAMHWVRQAPGKGLEWVAVISYDGSNKYYADSVKGRFTISRDNSKNTLYLQMNSLRAEDTAVYYCARGRYFDWFLFDYWGQGTLVTVSSASTKGPSVFPLAPSSKSTSGGTAALGCLVKDYFPEPVTVSWNSGALTSGVHTFPAVLQSSGLYSLSSVVTVPSSSLGTQTYICNVNHKPSNTKVDKKVEPKSCDKTHTCPPCPAPELLGGPSVFLFPPKPKDTLMISRTPEVTCVVVDVSHEDPEVKFNWYVDGVEVHNAKTKPREEQYNSTYRVVSVLTVLHQDWLNGKEYKCKVSNKALPAPIEKTISKAKGQPREPQVYTLPPSREEMTKNQVSLTCLVKGFYPSDIAVEWESNGQPENNYKTTPPVLDSDGSFFLYSKLTVDKSRWQQGNVFSCSVMHEALHNHYTQKSLSLSPGK

SEQ ID NO: 475 - protein, 219 aa, synthetic construct
  REGION 1..219: note = Synthetic Peptide
DTVMTQTPLSLSVTPGQPASISCKSSQSLLHSDGKTYLFWYLQKPGQPPQLLIYLTSNRFSGVPDRFSGSGSGTDFTLKISRVEAEDVGVYYCMQSLRLPLTFGGGTKVEIKRTVAAPSVFIFPPSDEQLKSGTASVVCLLNNFYPREAKVQWKVDNALQSGNSQESVTEQDSKDSTYSLSSTLTLSKADYEKHKVYACEVTHQGLSSPVTKSFNRGEC

SEQ ID NO: 476 - protein, 5 aa, synthetic construct
  REGION 1..5: note = Synthetic Peptide
SYPVH

SEQ ID NO: 477 - protein, 17 aa, synthetic construct
  REGION 1..17: note = Synthetic Peptide
VISYDGSNKYYADSVKG

SEQ ID NO: 478 - protein, 11 aa, synthetic construct
  REGION 1..11: note = Synthetic Peptide
GRYFDWFLFDY

SEQ ID NO: 479 - protein, 16 aa, synthetic construct
  REGION 1..16: note = Synthetic Peptide
KSSQSLLHSDGKTYLF

SEQ ID NO: 480 - protein, 7 aa, synthetic construct
  REGION 1..7: note = Synthetic Peptide
LTSNRFS

SEQ ID NO: 481 - protein, 9 aa, synthetic construct
  REGION 1..9: note = Synthetic Peptide
MQSLRLPLT

SEQ ID NO: 482 - protein, 120 aa, synthetic construct
  REGION 1..120: note = Synthetic Peptide
QVQLVESGGGVVQPGRSLRLSCAASGFTFSSYPVHWVRQAPGKGLEWVAVISYDGSNKYYADSVKGRFTISRDNSKNTLYLQMNSLRAEDTAVYYCARGRYFDWFLFDYWGQGTLVTVSS

SEQ ID NO: 483 - protein, 113 aa, synthetic construct; identical to SEQ ID NO: 473
  REGION 1..113: note = Synthetic Peptide

SEQ ID NO: 484 - protein, 450 aa, synthetic construct
  REGION 1..450: note = Synthetic Peptide
QVQLVESGGGVVQPGRSLRLSCAASGFTFSSYPVHWVRQAPGKGLEWVAVISYDGSNKYYADSVKGRFTISRDNSKNTLYLQMNSLRAEDTAVYYCARGRYFDWFLFDYWGQGTLVTVSSASTKGPSVFPLAPSSKSTSGGTAALGCLVKDYFPEPVTVSWNSGALTSGVHTFPAVLQSSGLYSLSSVVTVPSSSLGTQTYICNVNHKPSNTKVDKKVEPKSCDKTHTCPPCPAPELLGGPSVFLFPPKPKDTLMISRTPEVTCVVVDVSHEDPEVKFNWYVDGVEVHNAKTKPREEQYNSTYRVVSVLTVLHQDWLNGKEYKCKVSNKALPAPIEKTISKAKGQPREPQVYTLPPSREEMTKNQVSLTCLVKGFYPSDIAVEWESNGQPENNYKTTPPVLDSDGSFFLYSKLTVDKSRWQQGNVFSCSVMHEALHNHYTQKSLSLSPGK

SEQ ID NO: 485 - protein, 219 aa, synthetic construct; identical to SEQ ID NO: 475
  REGION 1..219: note = Synthetic Peptide

SEQ ID NO: 486 - protein, 5 aa, synthetic construct
  REGION 1..5: note = Synthetic Peptide
SYGMH

SEQ ID NO: 487 - protein, 17 aa, synthetic construct
  REGION 1..17: note = Synthetic Peptide
VISYDGSNKYYADSVKG

SEQ ID NO: 488 - protein, 11 aa, synthetic construct
  REGION 1..11: note = Synthetic Peptide
GRYFDWTLFDY

SEQ ID NO: 489 - protein, 16 aa, synthetic construct
  REGION 1..16: note = Synthetic Peptide
KSSQSLLHRDARTYLF

SEQ ID NO: 490 - protein, 7 aa, synthetic construct
  REGION 1..7: note = Synthetic Peptide
EVSNRFS

SEQ ID NO: 491 - protein, 9 aa, synthetic construct
  REGION 1..9: note = Synthetic Peptide
LQSLRLPLT

SEQ ID NO: 492 - protein, 120 aa, synthetic construct; identical to SEQ ID NO: 442
  REGION 1..120: note = Synthetic Peptide

SEQ ID NO: 493 - protein, 113 aa, synthetic construct
  REGION 1..113: note = Synthetic Peptide
DTVMTQTPLSLSVTPGQPASISCKSSQSLLHRDARTYLFWYLQKPGQPPQLLIYEVSNRFSGVPDRFSGSGSGTDFTLKISRVEAEDVGVYYCLQSLRLPLTFGGGTKVEIKR

SEQ ID NO: 494 - protein, 450 aa, synthetic construct; identical to SEQ ID NO: 444
  REGION 1..450: note = Synthetic Peptide

SEQ ID NO: 495 - protein, 219 aa, synthetic construct
  REGION 1..219: note = Synthetic Peptide
DTVMTQTPLSLSVTPGQPASISCKSSQSLLHRDARTYLFWYLQKPGQPPQLLIYEVSNRFSGVPDRFSGSGSGTDFTLKISRVEAEDVGVYYCLQSLRLPLTFGGGTKVEIKRTVAAPSVFIFPPSDEQLKSGTASVVCLLNNFYPREAKVQWKVDNALQSGNSQESVTEQDSKDSTYSLSSTLTLSKADYEKHKVYACEVTHQGLSSPVTKSFNRGEC

SEQ ID NO: 496 - protein, 5 aa, synthetic construct
  REGION 1..5: note = Synthetic Peptide
SYGMH

SEQ ID NO: 497 - protein, 17 aa, synthetic construct
  REGION 1..17: note = Synthetic Peptide
VISYDGSNKYYSRSVKG

SEQ ID NO: 498 - protein, 11 aa, synthetic construct
  REGION 1..11: note = Synthetic Peptide
GRYFDWFLFDY

SEQ ID NO: 499 - protein, 16 aa, synthetic construct
  REGION 1..16: note = Synthetic Peptide
KSSQSLLHSDARTYLF

SEQ ID NO: 500 - protein, 7 aa, synthetic construct
  REGION 1..7: note = Synthetic Peptide
LSSNRFS

SEQ ID NO: 501 - protein, 9 aa, synthetic construct
  REGION 1..9: note = Synthetic Peptide
LQSLRLPLT

SEQ ID NO: 502 - protein, 120 aa, synthetic construct
  REGION 1..120: note = Synthetic Peptide
QVQLVESGGGVVQPGRSLRLSCAASGFTFSSYGMHWVRQAPGKGLEWVAVISYDGSNKYYSRSVKGRFTISRDNSKNTLYLQMNSLRAEDTAVYYCARGRYFDWFLFDYWGQGTLVTVSS

SEQ ID NO: 503 - protein, 113 aa, synthetic construct
  REGION 1..113: note = Synthetic Peptide
DTVMTQTPLSLSVTPGQPASISCKSSQSLLHSDARTYLFWYLQKPGQPPQLLIYLSSNRFSGVPDRFSGSGSGTDFTLKISRVEAEDVGVYYCLQSLRLPLTFGGGTKVEIKR

SEQ ID NO: 504 - protein, 450 aa, synthetic construct; identical to SEQ ID NO: 464
  REGION 1..450: note = Synthetic Peptide

SEQ ID NO: 505 - protein, 219 aa, synthetic construct
  REGION 1..219: note = Synthetic Peptide
DTVMTQTPLSLSVTPGQPASISCKSSQSLLHSDARTYLFWYLQKPGQPPQLLIYLSSNRFSGVPDRFSGSGSGTDFTLKISRVEAEDVGVYYCLQSLRLPLTFGGGTKVEIKRTVAAPSVFIFPPSDEQLKSGTASVVCLLNNFYPREAKVQWKVDNALQSGNSQESVTEQDSKDSTYSLSSTLTLSKADYEKHKVYACEVTHQGLSSPVTKSFNRGEC

SEQ ID NO: 506 - protein, 5 aa, synthetic construct
  REGION 1..5: note = Synthetic Peptide
SYPMH

SEQ ID NO: 507 - protein, 17 aa, synthetic construct
  REGION 1..17: note = Synthetic Peptide
VISYDGSNKYYADSVKG

SEQ ID NO: 508 - protein, 11 aa, synthetic construct
  REGION 1..11: note = Synthetic Peptide
GRYFDWTLFDY

SEQ ID NO: 509 - protein, 16 aa, synthetic construct
  REGION 1..16: note = Synthetic Peptide
KSSQSLLHSDARTYLF

SEQ ID NO: 510 - protein, 7 aa, synthetic construct
  REGION 1..7: note = Synthetic Peptide
LRSNRFS

SEQ ID NO: 511 - protein, 9 aa, synthetic construct
  REGION 1..9: note = Synthetic Peptide
LQSLRLPLT

SEQ ID NO: 512 - protein, 120 aa, synthetic construct; identical to SEQ ID NO: 452
  REGION 1..120: note = Synthetic Peptide

SEQ ID NO: 513 - protein, 113 aa, synthetic construct
  REGION 1..113: note = Synthetic Peptide
DTVMTQTPLSLSVTPGQPASISCKSSQSLLHSDARTYLFWYLQKPGQPPQLLIYLRSNRFSGVPDRFSGSGSGTDFTLKISRVEAEDVGVYYCLQSLRLPLTFGGGTKVEIKR

SEQ ID NO: 514 - protein, 450 aa, synthetic construct; identical to SEQ ID NO: 454
  REGION 1..450: note = Synthetic Peptide

SEQ ID NO: 515 - protein, 219 aa, synthetic construct
  REGION 1..219: note = Synthetic Peptide
DTVMTQTPLSLSVTPGQPASISCKSSQSLLHSDARTYLFWYLQKPGQPPQLLIYLRSNRFSGVPDRFSGSGSGTDFTLKISRVEAEDVGVYYCLQSLRLPLTFGGGTKVEIKRTVAAPSVFIFPPSDEQLKSGTASVVCLLNNFYPREAKVQWKVDNALQSGNSQESVTEQDSKDSTYSLSSTLTLSKADYEKHKVYACEVTHQGLSSPVTKSFNRGEC

SEQ ID NO: 516 - protein, 5 aa, synthetic construct
  REGION 1..5: note = Synthetic Peptide
SYAMH

SEQ ID NO: 517 - protein, 17 aa, synthetic construct
  REGION 1..17: note = Synthetic Peptide
VISYDGSNKYYADSVKG

SEQ ID NO: 518 - protein, 11 aa, synthetic construct
  REGION 1..11: note = Synthetic Peptide
GRYFDWFLFDY

SEQ ID NO: 519 - protein, 16 aa, synthetic construct
  REGION 1..16: note = Synthetic Peptide
KSSQSLLHSDARTYLF

SEQ ID NO: 520 - protein, 7 aa, synthetic construct
  REGION 1..7: note = Synthetic Peptide
LTSNRFS

SEQ ID NO: 521 - protein, 9 aa, synthetic construct
  REGION 1..9: note = Synthetic Peptide
LQSLRLPLT

SEQ ID NO: 522 - protein, 120 aa, synthetic construct; identical to SEQ ID NO: 472
  REGION 1..120: note = Synthetic Peptide

SEQ ID NO: 523 - protein, 113 aa, synthetic construct
  REGION 1..113: note = Synthetic Peptide
DTVMTQTPLSLSVTPGQPASISCKSSQSLLHSDARTYLFWYLQKPGQPPQLLIYLTSNRFSGVPDRFSGSGSGTDFTLKISRVEAEDVGVYYCLQSLRLPLTFGGGTKVEIKR

SEQ ID NO: 524 - protein, 450 aa, synthetic construct; identical to SEQ ID NO: 474
  REGION 1..450: note = Synthetic Peptide

SEQ ID NO: 525 - protein, 219 aa, synthetic construct
  REGION 1..219: note = Synthetic Peptide
DTVMTQTPLSLSVTPGQPASISCKSSQSLLHSDARTYLFWYLQKPGQPPQLLIYLTSNRFSGVPDRFSGSGSGTDFTLKISRVEAEDVGVYYCLQSLRLPLTFGGGTKVEIKRTVAAPSVFIFPPSDEQLKSGTASVVCLLNNFYPREAKVQWKVDNALQSGNSQESVTEQDSKDSTYSLSSTLTLSKADYEKHKVYACEVTHQGLSSPVTKSFNRGEC

SEQ ID NO: 526 - protein, 5 aa, synthetic construct
  REGION 1..5: note = Synthetic Peptide
SYVMH

SEQ ID NO: 527 - protein, 17 aa, synthetic construct
  REGION 1..17: note = Synthetic Peptide
VISYDGSSQYYTDSVKG

SEQ ID NO: 528 - protein, 11 aa, synthetic construct
  REGION 1..11: note = Synthetic Peptide
GRLATAILFDY

SEQ ID NO: 529 - protein, 16 aa, synthetic construct
  REGION 1..16: note = Synthetic Peptide
KSSQSLLYSDGKTYLF

SEQ ID NO: 530 - protein, 7 aa, synthetic construct
  REGION 1..7: note = Synthetic Peptide
EVSNRFS

SEQ ID NO: 531 - protein, 9 aa, synthetic construct
  REGION 1..9: note = Synthetic Peptide
MQSIKLPLT

SEQ ID NO: 532 - protein, 120 aa, synthetic construct
  REGION 1..120: note = Synthetic Peptide
QVQLVESGGGVVQPGRSLRLSCEASGFTFSSYVMHWVRQAPGKGLEWVSVISYDGSSQYYTDSVKGRFTISRDNSKNTLNLQMNSLRAEDTAVYYCVRGRLATAILFDYWGQGTLVTVSS

SEQ ID NO: 533 - protein, 113 aa, synthetic construct
  REGION 1..113: note = Synthetic Peptide
DILMTQTPLSLSVTPGQPASISCKSSQSLLYSDGKTYLFWYLQRPGQPPQLLIYEVSNRFSGVPDRFSGSGSGTDFTLKISRVEAEDVGIYYCMQSIKLPLTFGGGTKVEIKR

SEQ ID NO: 534 - protein, 450 aa, synthetic construct
  REGION 1..450: note = Synthetic Peptide
QVQLVESGGGVVQPGRSLRLSCEASGFTFSSYVMHWVRQAPGKGLEWVSVISYDGSSQYYTDSVKGRFTISRDNSKNTLNLQMNSLRAEDTAVYYCVRGRLATAILFDYWGQGTLVTVSSASTKGPSVFPLAPSSKSTSGGTAALGCLVKDYFPEPVTVSWNSGALTSGVHTFPAVLQSSGLYSLSSVVTVPSSSLGTQTYICNVNHKPSNTKVDKKVEPKSCDKTHTCPPCPAPELLGGPSVFLFPPKPKDTLMISRTPEVTCVVVDVSHEDPEVKFNWYVDGVEVHNAKTKPREEQYNSTYRVVSVLTVLHQDWLNGKEYKCKVSNKALPAPIEKTISKAKGQPREPQVYTLPPSREEMTKNQVSLTCLVKGFYPSDIAVEWESNGQPENNYKTTPPVLDSDGSFFLYSKLTVDKSRWQQGNVFSCSVMHEALHNHYTQKSLSLSPGK

SEQ ID NO: 535 - protein, 219 aa, synthetic construct
  REGION 1..219: note = Synthetic Peptide
DILMTQTPLSLSVTPGQPASISCKSSQSLLYSDGKTYLFWYLQRPGQPPQLLIYEVSNRFSGVPDRFSGSGSGTDFTLKISRVEAEDVGIYYCMQSIKLPLTFGGGTKVEIKRTVAAPSVFIFPPSDEQLKSGTASVVCLLNNFYPREAKVQWKVDNALQSGNSQESVTEQDSKDSTYSLSSTLTLSKADYEKHKVYACEVTHQGLSSPVTKSFNRGEC

SEQ ID NO: 536 - protein, 5 aa, synthetic construct
  REGION 1..5: note = Synthetic Peptide
SYVMH

SEQ ID NO: 537 - protein, 17 aa, synthetic construct
  REGION 1..17: note = Synthetic Peptide
VISYDGSRQYYTDSVKG

SEQ ID NO: 538 - protein, 11 aa, synthetic construct
  REGION 1..11: note = Synthetic Peptide
GRLATSPLFDY

SEQ ID NO: 539 - protein, 16 aa, synthetic construct
  REGION 1..16: note = Synthetic Peptide
KSSQSLLYSDGKTYLF

SEQ ID NO: 540 - protein, 7 aa, synthetic construct
  REGION 1..7: note = Synthetic Peptide
EVSNRLS

SEQ ID NO: 541 - protein, 9 aa, synthetic construct
  REGION 1..9: note = Synthetic Peptide
MQSIKLPLT

SEQ ID NO: 542 - protein, 120 aa, synthetic construct
  REGION 1..120: note = Synthetic Peptide
QVQLVESGGGVVQPGRSLRLSCEASGFTFSSYVMHWVRQAPGKGLEWVSVISYDGSRQYYTDSVKGRFTISRDNSKNTLNLQMNSLRAEDTAVYYCVRGRLATSPLFDYWGQGTLVTVSS

SEQ ID NO: 543 - protein, 113 aa, synthetic construct
  REGION 1..113: note = Synthetic Peptide
DILMTQTPLSLSVTPGQPASISCKSSQSLLYSDGKTYLFWYLQRPGQPPQLLIYEVSNRLSGVPDRFSGSGSGTDFTLKISRVEAEDVGIYYCMQSIKLPLTFGGGTKVEIKR

SEQ ID NO: 544 - protein, 450 aa, synthetic construct
  REGION 1..450: note = Synthetic Peptide
QVQLVESGGGVVQPGRSLRLSCEASGFTFSSYVMHWVRQAPGKGLEWVSVISYDGSRQYYTDSVKGRFTISRDNSKNTLNLQMNSLRAEDTAVYYCVRGRLATSPLFDYWGQGTLVTVSSASTKGPSVFPLAPSSKSTSGGTAALGCLVKDYFPEPVTVSWNSGALTSGVHTFPAVLQSSGLYSLSSVVTVPSSSLGTQTYICNVNHKPSNTKVDKKVEPKSCDKTHTCPPCPAPELLGGPSVFLFPPKPKDTLMISRTPEVTCVVVDVSHEDPEVKFNWYVDGVEVHNAKTKPREEQYNSTYRVVSVLTVLHQDWLNGKEYKCKVSNKALPAPIEKTISKAKGQPREPQVYTLPPSREEMTKNQVSLTCLVKGFYPSDIAVEWESNGQPENNYKTTPPVLDSDGSFFLYSKLTVDKSRWQQGNVFSCSVMHEALHNHYTQKSLSLSPGK

SEQ ID NO: 545 - protein, 219 aa, synthetic construct
  REGION 1..219: note = Synthetic Peptide
DILMTQTPLSLSVTPGQPASISCKSSQSLLYSDGKTYLFWYLQRPGQPPQLLIYEVSNRLSGVPDRFSGSGSGTDFTLKISRVEAEDVGIYYCMQSIKLPLTFGGGTKVEIKRTVAAPSVFIFPPSDEQLKSGTASVVCLLNNFYPREAKVQWKVDNALQSGNSQESVTEQDSKDSTYSLSSTLTLSKADYEKHKVYACEVTHQGLSSPVTKSFNRGEC

SEQ ID NO: 546 - protein, 5 aa, synthetic construct
  REGION 1..5: note = Synthetic Peptide
SYVMH

SEQ ID NO: 547 - protein, 17 aa, synthetic construct
  REGION 1..17: note = Synthetic Peptide
VISYDGSRAYYTDSVKG

SEQ ID NO: 548 - protein, 11 aa, synthetic construct
  REGION 1..11: note = Synthetic Peptide
GRLATAIKLDY

SEQ ID NO: 549 - protein, 16 aa, synthetic construct
  REGION 1..16: note = Synthetic Peptide
KSSQSLLYSDGKTYLF

SEQ ID NO: 550 - protein, 7 aa, synthetic construct
  REGION 1..7: note = Synthetic Peptide
EVSNRFS

SEQ ID NO: 551 - protein, 9 aa, synthetic construct
  REGION 1..9: note = Synthetic Peptide
MQTLKLPLT

SEQ ID NO: 552 - protein, 120 aa, synthetic construct
  REGION 1..120: note = Synthetic Peptide
QVQLVESGGGVVQPGRSLRLSCEASGFTFSSYVMHWVRQAPGKGLEWVSVISYDGSRAYYTDSVKGRFTISRDNSKNTLNLQMNSLRAEDTAVYYCVRGRLATAIKLDYWGQGTLVTVSS

SEQ ID NO: 553 - protein, 113 aa, synthetic construct
  REGION 1..113: note = Synthetic Peptide
DILMTQTPLSLSVTPGQPASISCKSSQSLLYSDGKTYLFWYLQRPGQPPQLLIYEVSNRFSGVPDRFSGSGSGTDFTLKISRVEAEDVGIYYCMQTLKLPLTFGGGTKVEIKR

SEQ ID NO: 554 - protein, 450 aa, synthetic construct
  REGION 1..450: note = Synthetic Peptide
QVQLVESGGGVVQPGRSLRLSCEASGFTFSSYVMHWVRQAPGKGLEWVSVISYDGSRAYYTDSVKGRFTISRDNSKNTLNLQMNSLRAEDTAVYYCVRGRLATAIKLDYWGQGTLVTVSSASTKGPSVFPLAPSSKSTSGGTAALGCLVKDYFPEPVTVSWNSGALTSGVHTFPAVLQSSGLYSLSSVVTVPSSSLGTQTYICNVNHKPSNTKVDKKVEPKSCDKTHTCPPCPAPELLGGPSVFLFPPKPKDTLMISRTPEVTCVVVDVSHEDPEVKFNWYVDGVEVHNAKTKPREEQYNSTYRVVSVLTVLHQDWLNGKEYKCKVSNKALPAPIEKTISKAKGQPREPQVYTLPPSREEMTKNQVSLTCLVKGFYPSDIAVEWESNGQPENNYKTTPPVLDSDGSFFLYSKLTVDKSRWQQGNVFSCSVMHEALHNHYTQKSLSLSPGK

SEQ ID NO: 555 - protein, 219 aa, synthetic construct
  REGION 1..219: note = Synthetic Peptide
DILMTQTPLSLSVTPGQPASISCKSSQSLLYSDGKTYLFWYLQRPGQPPQLLIYEVSNRFSGVPDRFSGSGSGTDFTLKISRVEAEDVGIYYCMQTLKLPLTFGGGTKVEIKRTVAAPSVFIFPPSDEQLKSGTASVVCLLNNFYPREAKVQWKVDNALQSGNSQESVTEQDSKDSTYSLSSTLTLSKADYEKHKVYACEVTHQGLSSPVTKSFNRGEC

SEQ ID NO: 556 - protein, 355 aa, synthetic construct
  REGION 1..355: note = Synthetic Peptide
MDYRLDPSMTTMTDYYYPDSLSSPCDGELIQRNDKLLLAVFYCLLFVFSLLGNSLVILVLVVCKKLRNITDIYLLNLALSDLLFVFSFPFQTYYQLDQWVFGTVMCKVVSGFYYIGFYSSMFFITLMSVDRYLAVVHAVYAIKVRTIRMGTTLSLVVWLTAIMATIPLLVFYQVASEDGVLQCYSFYNQQTLKWKIFTNFEMNILGLLIPFTIFMFCYIKILHQLKRCQNHNKTKAIRLVLIVVIASLLFWVPFNVVLFLTSLHSMHILDGCSISQQLNYATHVTEIISFTHCCVNPVIYAFVGEKFKKHLSEIFQKSCSHIFIYLGRQMPRESCEKSSSCQQHSFRSSSIDYIL

SEQ ID NO: 557 - protein, 22 aa, synthetic construct
  REGION 1..22: note = Synthetic Peptide
MDMRVPAQLLGLLLLWLRGARC

SEQ ID NO: 558 - DNA, 66 bp, synthetic construct
  misc_feature 1..66: note = Synthetic Peptide
  source 1..66: mol_type = other DNA
atggacatgagagtgcctgcacagctgctgggcctgctgctgctgtggctgagaggcgccagatgc

SEQ ID NO: 559 - protein, 19 aa, synthetic construct
  REGION 1..19: note = Synthetic Peptide
MAWALLLLTLLTQGTGSWA

SEQ ID NO: 560 - DNA, 57 bp, synthetic construct
  misc_feature 1..57: note = Synthetic Peptide
  source 1..57: mol_type = other DNA
atggcctgggctctgctgctcctcaccctcctcactcagggcacagggtcctgggcc

SEQ ID NO: 561 - protein, 5 aa, synthetic construct
  REGION 1..5: note = Synthetic Peptide
NARMG

SEQ ID NO: 562 - protein, 19 aa, synthetic construct
  REGION 1..19: note = Synthetic Peptide
RIKSKTEGGTRDYAAPVKG

SEQ ID NO: 563 - protein, 4 aa, synthetic construct
  REGION 1..4: note = Synthetic Peptide
YSGV

SEQ ID NO: 564 - protein, 17 aa, synthetic construct
  REGION 1..17: note = Synthetic Peptide
KSSQSVLYSSNNKNYLA

SEQ ID NO: 565 - protein, 7 aa, synthetic construct
  REGION 1..7: note = Synthetic Peptide
WASTRES

SEQ ID NO: 566 - protein, 9 aa, synthetic construct
  REGION 1..9: note = Synthetic Peptide
QQYYSIPIT

SEQ ID NO: 567 - protein, 5 aa, synthetic construct
  REGION 1..5: note = Synthetic Peptide
NYGMH

SEQ ID NO: 568 - protein, 17 aa, synthetic construct
  REGION 1..17: note = Synthetic Peptide
VISYDGSNKFYADSVKG

SEQ ID NO: 569 - protein, 9 aa, synthetic construct
  REGION 1..9: note = Synthetic Peptide
AGGIGRFDY

SEQ ID NO: 570 - protein, 16 aa, synthetic construct
  REGION 1..16: note = Synthetic Peptide
KYSQSLLHSDGKTYLF

SEQ ID NO: 571 - protein, 7 aa, synthetic construct
  REGION 1..7: note = Synthetic Peptide
EVSNRFS

SEQ ID NO: 572 - protein, 9 aa, synthetic construct
  REGION 1..9: note = Synthetic Peptide
MQTLKLPLT

SEQ ID NO: 573 - protein, 444 aa, synthetic construct
  REGION 1..444: note = Synthetic Peptide
EVQLVESGGGLVKPGGSLRLSCAASGFTFSNARMGWVRQAPGKGLEWVGRIKSKTEGGTRDYAAPVKGRFTISRDDSKNTLYLQMNSLKTEDTAVYYCTSYSGVWGQGTMVTVSSASTKGPSVFPLAPSSKSTSGGTAALGCLVKDYFPEPVTVSWNSGALTSGVHTFPAVLQSSGLYSLSSVVTVPSSSLGTQTYICNVNHKPSNTKVDKKVEPKSCDKTHTCPPCPAPELLGGPSVFLFPPKPKDTLMISRTPEVTCVVVDVSHEDPEVKFNWYVDGVEVHNAKTKPREEQYNSTYRVVSVLTVLHQDWLNGKEYKCKVSNKALPAPIEKTISKAKGQPREPQVYTLPPSREEMTKNQVSLTCLVKGFYPSDIAVEWESNGQPENNYKTTPPVLDSDGSFFLYSKLTVDKSRWQQGNVFSCSVMHEALHNHYTQKSLSLSPG

SEQ ID NO: 574 - protein, 444 aa, synthetic construct; identical to SEQ ID NO: 573
  REGION 1..444: note = Synthetic Peptide

SEQ ID NO: 575 - protein, 447 aa, synthetic construct
  REGION 1..447: note = Synthetic Peptide
QVQLVESGGGVVQPGRSLRLSCAASGFTFSNYGMHWVRQAPGKGLEWVAVISYDGSNKFYIRSVKGRFTISRDNSKNTLYLQMNSLRAEDTAVYYCARAGGIGRFDYWGQGTLVTVSSASTKGPSVFPLAPSSKSTSGGTAALGCLVKDYFPEPVTVSWNSGALTSGVHTFPAVLQSSGLYSLSSVVTVPSSSLGTQTYICNVNHKPSNTKVDKKVEPKSCDKTHTCPPCPAPELLGGPSVFLFPPKPKDTLMISRTPEVTCVVVDVSHEDPEVKFNWYVDGVEVHNAKTKPREEQYNSTYRVVSVLTVLHQDWLNGKEYKCKVSNKALPAPIEKTISKAKGQPREPQVYTLPPSREEMTKNQVSLTCLVKGFYPSDIAVEWESNGQPENNYKTTPPVLDSDGSFFLYSKLTVDKSRWQQGNVFSCSVMHEALHNHYTQKSLSLSPG

SEQ ID NO: 576 - protein, 447 aa, synthetic construct
  REGION 1..447: note = Synthetic Peptide
QVQLVESGGGVVQPGRSLRLSCAASGFTFSNYGMHWVRQAPGKGLEWVAVISYDGSNKFYLKSVKGRFTISRDNSKNTLYLQMNSLRAEDTAVYYCARAGGIGRFDYWGQGTLVTVSSASTKGPSVFPLAPSSKSTSGGTAALGCLVKDYFPEPVTVSWNSGALTSGVHTFPAVLQSSGLYSLSSVVTVPSSSLGTQTYICNVNHKPSNTKVDKKVEPKSCDKTHTCPPCPAPELLGGPSVFLFPPKPKDTLMISRTPEVTCVVVDVSHEDPEVKFNWYVDGVEVHNAKTKPREEQYNSTYRVVSVLTVLHQDWLNGKEYKCKVSNKALPAPIEKTISKAKGQPREPQVYTLPPSREEMTKNQVSLTCLVKGFYPSDIAVEWESNGQPENNYKTTPPVLDSDGSFFLYSKLTVDKSRWQQGNVFSCSVMHEALHNHYTQKSLSLSPG

SEQ ID NO: 577 - protein, 451 aa, synthetic construct
  REGION 1..451: note = Synthetic Peptide
EVQLVESGGGLVKPGGSLRLSCAASGFIFSNAWMSWVRQAPGKGLEWVARIKRRTDGGTTDYAAPVKDRFTISRDDSKNTLFLQMNSLKTEDTAVYYCTTVTMVRGVIADYWGQGTLVTVSSASTKGPSVFPLAPSSKSTSGGTAALGCLVKDYFPEPVTVSWNSGALTSGVHTFPAVLQSSGLYSLSSVVTVPSSSLGTQTYICNVNHKPSNTKVDKKVEPKSCDKTHTCPPCPAPELLGGPSVFLFPPKPKDTLMISRTPEVTCVVVDVSHEDPEVKFNWYVDGVEVHNAKTKPREEQYNSTYRVVSVLTVLHQDWLNGKEYKCKVSNKALPAPIEKTISKAKGQPREPQVYTLPPSREEMTKNQVSLTCLVKGFYPSDIAVEWESNGQPENNYKTTPPVLDSDGSFFLYSKLTVDKSRWQQGNVFSCSVMHEALHNHYTQKSLSLSPG

SEQ ID NO: 578 - protein, 451 aa, synthetic construct
  REGION 1..451: note = Synthetic Peptide
EVQLVESGGGLVKPGGSLRLSCAASGFIFSNAWMSWVRQAPGKGLEWVGRIKRKTDGGTTDYAAPVKGRFTISRDDSKNTLYLLMNSLKIEDTAVYYCTVVTLVRGIIFDYWGQGTLVTVSSASTKGPSVFPLAPSSKSTSGGTAALGCLVKDYFPEPVTVSWNSGALTSGVHTFPAVLQSSGLYSLSSVVTVPSSSLGTQTYICNVNHKPSNTKVDKKVEPKSCDKTHTCPPCPAPELLGGPSVFLFPPKPKDTLMISRTPEVTCVVVDVSHEDPEVKFNWYVDGVEVHNAKTKPREEQYNSTYRVVSVLTVLHQDWLNGKEYKCKVSNKALPAPIEKTISKAKGQPREPQVYTLPPSREEMTKNQVSLTCLVKGFYPSDIAVEWESNGQPENNYKTTPPVLDSDGSFFLYSKLTVDKSRWQQGNVFSCSVMHEALHNHYTQKSLSLSPG

SEQ ID NO: 579 - protein, 451 aa, synthetic construct
  REGION 1..451: note = Synthetic Peptide
EVQLVESGGGLVKPGGSLRLSCAASGFIFSNAWLQWVRQAPGKGLEWVGRIKRKTDQLTTDYAAPVKGRFTISRDDSKNTLYLLMNSLKIEDTAVYYCTVVTRSRGIIFDYWGQGTLVTVSSASTKGPSVFPLAPSSKSTSGGTAALGCLVKDYFPEPVTVSWNSGALTSGVHTFPAVLQSSGLYSLSSVVTVPSSSLGTQTYICNVNHKPSNTKVDKKVEPKSCDKTHTCPPCPAPELLGGPSVFLFPPKPKDTLMISRTPEVTCVVVDVSHEDPEVKFNWYVDGVEVHNAKTKPREEQYNSTYRVVSVLTVLHQDWLNGKEYKCKVSNKALPAPIEKTISKAKGQPREPQVYTLPPSREEMTKNQVSLTCLVKGFYPSDIAVEWESNGQPENNYKTTPPVLDSDGSFFLYSKLTVDKSRWQQGNVFSCSVMHEALHNHYTQKSLSLSPG

SEQ ID NO: 580 - protein, 451 aa, synthetic construct
  REGION 1..451: note = Synthetic Peptide
EVQLVESGGGLVKPGGSLRLSCAASGFIFSNAWLQWVRQAPGKGLEWVGRIKRKTDASTTDYAAPVKGRFTISRDDSKNTLYLLMNSLKIEDTAVYYCTVVTRSRGIIFDYWGQGTLVTVSSASTKGPSVFPLAPSSKSTSGGTAALGCLVKDYFPEPVTVSWNSGALTSGVHTFPAVLQSSGLYSLSSVVTVPSSSLGTQTYICNVNHKPSNTKVDKKVEPKSCDKTHTCPPCPAPELLGGPSVFLFPPKPKDTLMISRTPEVTCVVVDVSHEDPEVKFNWYVDGVEVHNAKTKPREEQYNSTYRVVSVLTVLHQDWLNGKEYKCKVSNKALPAPIEKTISKAKGQPREPQVYTLPPSREEMTKNQVSLTCLVKGFYPSDIAVEWESNGQPENNYKTTPPVLDSDGSFFLYSKLTVDKSRWQQGNVFSCSVMHEALHNHYTQKSLSLSPG

SEQ ID NO: 581 - protein, 449 aa, synthetic construct
  REGION 1..449: note = Synthetic Peptide
QVQLVESGGGVVQPGRSLRLSCAASGFTFSSYGMHWVRQAPGKGLEWVAVISYDGSNKYYADSVKGRFTISRDNSKNTLYLQMNSLRAEDTAVYYCARGRYFDWFLFDYWGQGTLVTVSSASTKGPSVFPLAPSSKSTSGGTAALGCLVKDYFPEPVTVSWNSGALTSGVHTFPAVLQSSGLYSLSSVVTVPSSSLGTQTYICNVNHKPSNTKVDKKVEPKSCDKTHTCPPCPAPELLGGPSVFLFPPKPKDTLMISRTPEVTCVVVDVSHEDPEVKFNWYVDGVEVHNAKTKPREEQYNSTYRVVSVLTVLHQDWLNGKEYKCKVSNKALPAPIEKTISKAKGQPREPQVYTLPPSREEMTKNQVSLTCLVKGFYPSDIAVEWESNGQPENNYKTTPPVLDSDGSFFLYSKLTVDKSRWQQGNVFSCSVMHEALHNHYTQKSLSLSPG

SEQ ID NO: 582 - protein, 449 aa, synthetic construct
  REGION 1..449: note = Synthetic Peptide
QVQLVESGGGVVQPGRSLRLSCAASGFTFSSYGMHWVRQAPGKGLEWVAVISYDGSNKYYADSVKGRFTISRDNSKNTLYLQMNSLRAEDTAVYYCARGRYFDWTLFDYWGQGTLVTVSSASTKGPSVFPLAPSSKSTSGGTAALGCLVKDYFPEPVTVSWNSGALTSGVHTFPAVLQSSGLYSLSSVVTVPSSSLGTQTYICNVNHKPSNTKVDKKVEPKSCDKTHTCPPCPAPELLGGPSVFLFPPKPKDTLMISRTPEVTCVVVDVSHEDPEVKFNWYVDGVEVHNAKTKPREEQYNSTYRVVSVLTVLHQDWLNGKEYKCKVSNKALPAPIEKTISKAKGQPREPQVYTLPPSREEMTKNQVSLTCLVKGFYPSDIAVEWESNGQPENNYKTTPPVLDSDGSFFLYSKLTVDKSRWQQGNVFSCSVMHEALHNHYTQKSLSLSPG

SEQ ID NO: 583 - protein, 449 aa, synthetic construct
  REGION 1..449: note = Synthetic Peptide
QVQLVESGGGVVQPGRSLRLSCAASGFTFSSYPMHWVRQAPGKGLEWVAVISYDGSNKYYADSVKGRFTISRDNSKNTLYLQMNSLRAEDTAVYYCARGRYFDWTLFDYWGQGTLVTVSSASTKGPSVFPLAPSSKSTSGGTAALGCLVKDYFPEPVTVSWNSGALTSGVHTFPAVLQSSGLYSLSSVVTVPSSSLGTQTYICNVNHKPSNTKVDKKVEPKSCDKTHTCPPCPAPELLGGPSVFLFPPKPKDTLMISRTPEVTCVVVDVSHEDPEVKFNWYVDGVEVHNAKTKPREEQYNSTYRVVSVLTVLHQDWLNGKEYKCKVSNKALPAPIEKTISKAKGQPREPQVYTLPPSREEMTKNQVSLTCLVKGFYPSDIAVEWESNGQPENNYKTTPPVLDSDGSFFLYSKLTVDKSRWQQGNVFSCSVMHEALHNHYTQKSLSLSPG

SEQ ID NO: 584 - protein, 449 aa, synthetic construct
  REGION 1..449: note = Synthetic Peptide
QVQLVESGGGVVQPGRSLRLSCAASGFTFSSYGMHWVRQAPGKGLEWVAVISYDGSNKYYSRSVKGRFTISRDNSKNTLYLQMNSLRAEDTAVYYCARGRYFDWFLFDYWGQGTLVTVSSASTKGPSVFPLAPSSKSTSGGTAALGCLVKDYFPEPVTVSWNSGALTSGVHTFPAVLQSSGLYSLSSVVTVPSSSLGTQTYICNVNHKPSNTKVDKKVEPKSCDKTHTCPPCPAPELLGGPSVFLFPPKPKDTLMISRTPEVTCVVVDVSHEDPEVKFNWYVDGVEVHNAKTKPREEQYNSTYRVVSVLTVLHQDWLNGKEYKCKVSNKALPAPIEKTISKAKGQPREPQVYTLPPSREEMTKNQVSLTCLVKGFYPSDIAVEWESNGQPENNYKTTPPVLDSDGSFFLYSKLTVDKSRWQQGNVFSCSVMHEALHNHYTQKSLSLSPG

SEQ ID NO: 585 - protein, 449 aa, synthetic construct
  REGION 1..449: note = Synthetic Peptide
QVQLVESGGGVVQPGRSLRLSCAASGFTFSSYAMHWVRQAPGKGLEWVAVISYDGSNKYYADSVKGRFTISRDNSKNTLYLQMNSLRAEDTAVYYCARGRYFDWFLFDYWGQGTLVTVSSASTKGPSVFPLAPSSKSTSGGTAALGCLVKDYFPEPVTVSWNSGALTSGVHTFPAVLQSSGLYSLSSVVTVPSSSLGTQTYICNVNHKPSNTKVDKKVEPKSCDKTHTCPPCPAPELLGGPSVFLFPPKPKDTLMISRTPEVTCVVVDVSHEDPEVKFNWYVDGVEVHNAKTKPREEQYNSTYRVVSVLTVLHQDWLNGKEYKCKVSNKALPAPIEKTISKAKGQPREPQVYTLPPSREEMTKNQVSLTCLVKGFYPSDIAVEWESNGQPENNYKTTPPVLDSDGSFFLYSKLTVDKSRWQQGNVFSCSVMHEALHNHYTQKSLSLSPG

SEQ ID NO: 586 - protein, 449 aa, synthetic construct
  REGION 1..449: note = Synthetic Peptide
QVQLVESGGGVVQPGRSLRLSCAASGFTFSSYPVHWVRQAPGKGLEWVAVISYDGSNKYYADSVKGRFTISRDNSKNTLYLQMNSLRAEDTAVYYCARGRYFDWFLFDYWGQGTLVTVSSASTKGPSVFPLAPSSKSTSGGTAALGCLVKDYFPEPVTVSWNSGALTSGVHTFPAVLQSSGLYSLSSVVTVPSSSLGTQTYICNVNHKPSNTKVDKKVEPKSCDKTHTCPPCPAPELLGGPSVFLFPPKPKDTLMISRTPEVTCVVVDVSHEDPEVKFNWYVDGVEVHNAKTKPREEQYNSTYRVVSVLTVLHQDWLNGKEYKCKVSNKALPAPIEKTISKAKGQPREPQVYTLPPSREEMTKNQVSLTCLVKGFYPSDIAVEWESNGQPENNYKTTPPVLDSDGSFFLYSKLTVDKSRWQQGNVFSCSVMHEALHNHYTQKSLSLSPG

SEQ ID NO: 587 - protein, 449 aa, synthetic construct; identical to SEQ ID NO: 582
  REGION 1..449: note = Synthetic Peptide

SEQ ID NO: 588 - protein, 449 aa, synthetic construct; identical to SEQ ID NO: 584
  REGION 1..449: note = Synthetic Peptide

SEQ ID NO: 589 - protein, 449 aa, synthetic construct; identical to SEQ ID NO: 583
  REGION 1..449: note = Synthetic Peptide

SEQ ID NO: 590 - protein, 449 aa, synthetic construct; identical to SEQ ID NO: 585
  REGION 1..449: note = Synthetic Peptide

SEQ ID NO: 591 - protein, 449 aa, synthetic construct
  REGION 1..449: note = Synthetic Peptide
QVQLVESGGGVVQPGRSLRLSCEASGFTFSSYVMHWVRQAPGKGLEWVSVISYDGSSQYYTDSVKGRFTISRDNSKNTLNLQMNSLRAEDTAVYYCVRGRLATAILFDYWGQGTLVTVSSASTKGPSVFPLAPSSKSTSGGTAALGCLVKDYFPEPVTVSWNSGALTSGVHTFPAVLQSSGLYSLSSVVTVPSSSLGTQTYICNVNHKPSNTKVDKKVEPKSCDKTHTCPPCPAPELLGGPSVFLFPPKPKDTLMISRTPEVTCVVVDVSHEDPEVKFNWYVDGVEVHNAKTKPREEQYNSTYRVVSVLTVLHQDWLNGKEYKCKVSNKALPAPIEKTISKAKGQPREPQVYTLPPSREEMTKNQVSLTCLVKGFYPSDIAVEWESNGQPENNYKTTPPVLDSDGSFFLYSKLTVDKSRWQQGNVFSCSVMHEALHNHYTQKSLSLSPG

SEQ ID NO: 592 - protein, 449 aa, synthetic construct
  REGION 1..449: note = Synthetic Peptide
QVQLVESGGGVVQPGRSLRLSCEASGFTFSSYVMHWVRQAPGKGLEWVSVISYDGSRQYYTDSVKGRFTISRDNSKNTLNLQMNSLRAEDTAVYYCVRGRLATSPLFDYWGQGTLVTVSSASTKGPSVFPLAPSSKSTSGGTAALGCLVKDYFPEPVTVSWNSGALTSGVHTFPAVLQSSGLYSLSSVVTVPSSSLGTQTYICNVNHKPSNTKVDKKVEPKSCDKTHTCPPCPAPELLGGPSVFLFPPKPKDTLMISRTPEVTCVVVDVSHEDPEVKFNWYVDGVEVHNAKTKPREEQYNSTYRVVSVLTVLHQDWLNGKEYKCKVSNKALPAPIEKTISKAKGQPREPQVYTLPPSREEMTKNQVSLTCLVKGFYPSDIAVEWESNGQPENNYKTTPPVLDSDGSFFLYSKLTVDKSRWQQGNVFSCSVMHEALHNHYTQKSLSLSPG

SEQ ID NO: 593 - protein, 449 aa, synthetic construct
  REGION 1..449: note = Synthetic Peptide
QVQLVESGGGVVQPGRSLRLSCEASGFTFSSYVMHWVRQAPGKGLEWVSVISYDGSRAYYTDSVKGRFTISRDNSKNTLNLQMNSLRAEDTAVYYCVRGRLATAIKLDYWGQGTLVTVSSASTKGPSVFPLAPSSKSTSGGTAALGCLVKDYFPEPVTVSWNSGALTSGVHTFPAVLQSSGLYSLSSVVTVPSSSLGTQTYICNVNHKPSNTKVDKKVEPKSCDKTHTCPPCPAPELLGGPSVFLFPPKPKDTLMISRTPEVTCVVVDVSHEDPEVKFNWYVDGVEVHNAKTKPREEQYNSTYRVVSVLTVLHQDWLNGKEYKCKVSNKALPAPIEKTISKAKGQPREPQVYTLPPSREEMTKNQVSLTCLVKGFYPSDIAVEWESNGQPENNYKTTPPVLDSDGSFFLYSKLTVDKSRWQQGNVFSCSVMHEALHNHYTQKSLSLSPG

SEQ ID NO: 594 - DNA, 1338 bp, synthetic construct
  misc_feature 1..1338: note = Synthetic Peptide
  source 1..1338: mol_type = other DNA
gaggtgcagctggtggagtctgggggaggcttggtaaagcctggggggtccctgagactctcctgtgcagcctctggatttactttcagtaacgcccggatgggctgggtccgccaggctccagggaaggggctggagtgggttggccgtattaaaagcaaaactgaaggtgggacaagagactacgctgcacccgtgaaaggcagattcaccatctcaagagatgattcaaaaaacacgctgtatctgcaaatgaacagcctgaaaaccgaggacacagccgtgtattattgtacctcgtatagtggggtctggggccaagggacaatggtcaccgtctcttcagcctccaccaagggcccatcggtcttccccctggcaccctcctccaagagcacctctgggggcacagcggccctgggctgcctggtcaaggactacttccccgaaccggtgacggtgtcgtggaactcaggcgccctgaccagcggcgtgcacaccttcccggctgtcctacagtcctcaggactctactccctcagcagcgtggtgaccgtgccctccagcagcttgggcacccagacctacatctgcaacgtgaatcacaagcccagcaacaccaaggtggacaagaaagttgagcccaaatcttgtgacaaaactcacacatgcccaccgtgcccagcacctgaactcctggggggaccgtcagtcttcctcttccccccaaaacccaaggacaccctcatgatctcccggacccctgaggtcacatgcgtggtggtggacgtgagccacgaagaccctgaggtcaagttcaactggtacgtggacggcgtggaggtgcataatgccaagacaaagccgcgggaggagcagtacaacagcacgtaccgtgtggtcagcgtcctcaccgtcctgcaccaggactggctgaatggcaaggagtacaagtgcaaggtgtccaacaaagccctcccagcccccatcgagaaaaccatctccaaagccaaagggcagccccgagaaccacaggtgtacaccctgcccccatcccgggaggagatgaccaagaaccaggtcagcctgacctgcctggtcaaaggcttctatcccagcgacatcgccgtggagtgggagagcaatgggcagccggagaacaactacaagaccacgcctcccgtgctggactccgacggctccttcttcctctatagcaagctcaccgtggacaagagcaggtggcagcaggggaacgtcttctcatgctccgtgatgcatgaggctctgcacaaccactacacgcagaagagcctctccctgtctccgggcaaatag

SEQ ID NO: 595 - DNA, 663 bp, synthetic construct
  misc_feature 1..663: note = Synthetic Peptide
  source 1..663: mol_type = other DNA
gacatcgtgatgacccagtctccagactccctggctgtgtctctgggcgagagggccaccatcaactgcaagtccagccagagtgttttatacagttccaacaataagaactacttagcttggtaccatcagaaaccaggacagtctcctaagctgctcatttcctgggcatctacccgggaatccggggtccctgaccgattcagtggcagcgggtctgggacagatttcactctcaccatcaacagcctgcaggctgaagatgtggcagtttattactgtcaacaatattatagtattccgatcactttcggcggagggaccaaggtggagatcaaacgaacggtggctgcaccatctgtcttcatcttcccgccatctgatgagcagttgaaatctggaactgcctctgttgtgtgcctgctgaataacttctatcccagagaggccaaagtacagtggaaggtggataacgccctccaatcgggtaactcccaggagagtgtcacagagcaggacagcaaggacagcacctacagcctcagcagcaccctgacgctgagcaaagcagactacgagaaacacaaagtctacgcctgcgaagtcacccatcagggcctgagctcgcccgtcacaaagagcttcaacaggggagagtgttag

SEQ ID NO: 596 - DNA, 1338 bp, synthetic construct; identical to SEQ ID NO: 594
  misc_feature 1..1338: note = Synthetic Peptide
  source 1..1338: mol_type = other DNA

SEQ ID NO: 597 - DNA, 663 bp, synthetic construct
  misc_feature 1..663: note = Synthetic Peptide
  source 1..663: mol_type = other DNA
gacatcgtgatgacccagtctccagactccctggctgtgtctctgggcgagagggccaccatcaactgcaagtccagccagagtgttttatacagttccaacaataagaactacttagcttggtaccagcagaaaccaggacagccccctaagctgctcatttcctgggcatctacccgggaatccggggtccctgaccgattcagtggcagcgggtctgggacagatttcactctcaccatcaacagcctgcaggctgaagatgtggcagtttattactgtcaacaatattatagtattccgatcactttcggcggagggaccaaggtggagatcaaacgaacggtggctgcaccatctgtcttcatcttcccgccatctgatgagcagttgaaatctggaactgcctctgttgtgtgcctgctgaataacttctatcccagagaggccaaagtacagtggaaggtggataacgccctccaatcgggtaactcccaggagagtgtcacagagcaggacagcaaggacagcacctacagcctcagcagcaccctgacgctgagcaaagcagactacgagaaacacaaagtctacgcctgcgaagtcacccatcagggcctgagctcgcccgtcacaaagagcttcaacaggggagagtgttag

SEQ ID NO: 598 - DNA, 1347 bp, synthetic construct
  misc_feature 1..1347: note = Synthetic Peptide
  source 1..1347: mol_type = other DNA
caggtgcagttggtggagtctgggggaggcgtggtccagcctgggaggtccctgagactctcctgtgcagcctctggattcaccttcagtaactatggcatgcactgggtccgccaggctccaggcaaggggctggagtgggtggcagtcatatcatatgatggaagtaataaattctatatcagatccgtgaagggccgattcaccatctccagagacaattccaagaacactctgtatcttcaaatgaacagcctgagagccgaggacacggctgtatattattgtgcgagagccgggggtatagggcgttttgactactggggccagggaaccctggtcaccgtctcctcagcctccaccaagggcccatcggtcttccccctggcaccctcctccaagagcacctctgggggcacagcggccctgggctgcctggtcaaggactacttccccgaaccggtgacggtgtcgtggaactcaggcgccctgaccagcggcgtgcacaccttcccggctgtcctacagtcctcaggactctactccctcagcagcgtggtgaccgtgccctccagcagcttgggcacccagacctacatctgcaacgtgaatcacaagcccagcaacaccaaggtggacaagaaagttgagcccaaatcttgtgacaaaactcacacatgcccaccgtgcccagcacctgaactcctggggggaccgtcagtcttcctcttccccccaaaacccaaggacaccctcatgatctcccggacccctgaggtcacatgcgtggtggtggacgtgagccacgaagaccctgaggtcaagttcaactggtacgtggacggcgtggaggtgcataatgccaagacaaagccgcgggaggagcagtacaacagcacgtaccgtgtggtcagcgtcctcaccgtcctgcaccaggactggctgaatggcaaggagtacaagtgcaaggtgtccaacaaagccctcccagcccccatcgagaaaaccatctccaaagccaaagggcagccccgagaaccacaggtgtacaccctgcccccatcccgggaggagatgaccaagaaccaggtcagcctgacctgcctggtcaaaggcttctatcccagcgacatcgccgtggagtgggagagcaatgggcagccggagaacaactacaagaccacgcctcccgtgctggactccgacggctccttcttcctctatagcaagctcaccgtggacaagagcaggtggcagcaggggaacgtcttctcatgctccgtgatgcatgaggctctgcacaaccactacacgcagaagagcctctccctgtctccgggcaaatag

SEQ ID NO: 599 - protein, 660 aa, synthetic construct
  REGION 1..660: note = Synthetic Peptide
GATATCGTAATGACCCAGACTCCACTCTCTCTGTCCGTCACCCCTGGACAGCCGGCCTCCATCTCCTGCAAGGCCGCCCAGAGCCTCCTGCACAGTGATGGAAAGACCTATTTGTTTTGGTACCTGCAGAAGCCAGGCCAGAGCCCACAGCTCCTGATCTATGAAGTTTCCAACCGGTTCTCTGGAGTGCCAGATAGGTTCAGTGGCAGCGGGTCAGGGACAGATTTCACACTGAAGATCAGCCGGGTGGAGGCTGAGGATGTTGGGGTGTATTACTGCATGCAAACTTTAAAGCTTCCGCTCACTTTCGGCGGAGGGACCAAGGTGGAGATCAAGCGAACGGTGGCTGCACCATCTGTCTTCATCTTCCCGCCATCTGATGAGCAGTTGAAATCTGGAACTGCCTCTGTTGTGTGCCTGCTGAATAACTTCTATCCCAGAGAGGCCAAAGTACAGTGGAAGGTGGATAACGCCCTCCAATCGGGTAACTCCCAGGAGAGTGTCACAGAGCAGGACAGCAAGGACAGCACCTACAGCCTCAGCAGCACCCTGACGCTGAGCAAAGCAGACTACGAGAAACACAAAGTCTACGCCTGCGAAGTCACCCATCAGGGCCTGAGCTCGCCCGTCACAAAGAGCTTCAACAGGGGAGAGTGTTAG

SEQ ID NO: 600 - DNA, 1347 bp, synthetic construct
  misc_feature 1..1347: note = Synthetic Peptide
  source 1..1347: mol_type = other DNA
caggtgcagttggtggagtctgggggaggcgtggtccagcctgggaggtccctgagactctcctgtgcagcctctggattcaccttcagtaactatggcatgcactgggtccgccaggctccaggcaaggggctggagtgggtggcagtcatatcatatgatggaagtaataaattctatctgaagtccgtgaagggccgattcaccatctccagagacaattccaagaacactctgtatcttcaaatgaacagcctgagagccgaggacacggctgtatattattgtgcgagagccgggggtatagggcgttttgactactggggccagggaaccctggtcaccgtctcctcagcctccaccaagggcccatcggtcttccccctggcaccctcctccaagagcacctctgggggcacagcggccctgggctgcctggtcaaggactacttccccgaaccggtgacggtgtcgtggaactcaggcgccctgaccagcggcgtgcacaccttcccggctgtcctacagtcctcaggactctactccctcagcagcgtggtgaccgtgccctccagcagcttgggcacccagacctacatctgcaacgtgaatcacaagcccagcaacaccaaggtggacaagaaagttgagcccaaatcttgtgacaaaactcacacatgcccaccgtgcccagcacctgaactcctggggggaccgtcagtcttcctcttccccccaaaacccaaggacaccctcatgatctcccggacccctgaggtcacatgcgtggtggtggacgtgagccacgaagaccctgaggtcaagttcaactggtacgtggacggcgtggaggtgcataatgccaagacaaagccgcgggaggagcagtacaacagcacgtaccgtgtggtcagcgtcctcaccgtcctgcaccaggactggctgaatggcaaggagtacaagtgcaaggtgtccaacaaagccctcccagcccccatcgagaaaaccatctccaaagccaaagggcagccccgagaaccacaggtgtacaccctgcccccatcccgggaggagatgaccaagaaccaggtcagcctgacctgcctggtcaaaggcttctatcccagcgacatcgccgtggagtgggagagcaatgggcagccggagaacaactacaagaccacgcctcccgtgctggactccgacggctccttcttcctctatagcaagctcaccgtggacaagagcaggtggcagcaggggaacgtcttctcatgctccgtgatgcatgaggctctgcacaaccactacacgcagaagagcctctccctgtctccgggcaaatag

SEQ ID NO: 601 - DNA, 660 bp, synthetic construct
  misc_feature 1..660: note = Synthetic Peptide
  source 1..660: mol_type = other DNA
gatatcgtaatgacccagactccactctctctgtccgtcacccctggacagccggcctccatctcctgcaaggccagtcagagcctcctgcacagtgatggaaagacctatttgttttggtacctgcagaagccaggccagagcccacagctcctgatctatgaagtttccaaccggttctctggagtgccagataggttcagtggcagcgggtcagggacagatttcacactgaagatcagccgggtggaggctgaggatgttggggtgtattactgcatgcaaactttaaagcttccgctcactttcggcggagggaccaaggtggagatcaagcgaacggtggctgcaccatctgtcttcatcttcccgccatctgatgagcagttgaaatctggaactgcctctgttgtgtgcctgctgaataacttctatcccagagaggccaaagtacagtggaaggtggataacgccctccaatcgggtaactcccaggagagtgtcacagagcaggacagcaaggacagcacctacagcctcagcagcaccctgacgctgagcaaagcagactacgagaaacacaaagtctacgcctgcgaagtcacccatcagggcctgagctcgcccgtcacaaagagcttcaacaggggagagtgttag

SEQ ID NO: 602 - protein, 1359 aa, synthetic construct
  REGION 1..1359: note = Synthetic Peptide
GAGGTGCAGCTGGTGGAGTCTGGGGGAGGCTTGGTAAAGCCTGGGGGGTCCCTTAGACTCTCCTGTGCAGCCTCTGGATTCATTTTTAGTAATGCCTGGATGAGCTGGGTCCGCCAGGCTCCAGGGAAGGGGCTGGAGTGGGTTGCCCGTATTAAAAGGAGAACTGATGGTGGGACAACTGACTACGCTGCACCCGTGAAAGACAGATTCACCATCTCAAGAGATGATTCAAAAAACACGCTGTTTCTGCAAATGAACAGCCTGAAAACCGAGGACACAGCCGTGTATTACTGTACCACAGTTACTATGGTTCGGGGAGTTATTGCTGATTACTGGGGCCAGGGAACCCTGGTCACCGTCTCCTCAGCCTCCACCAAGGGCCCATCGGTCTTCCCCCTGGCACCCTCCTCCAAGAGCACCTCTGGGGGCACAGCGGCCCTGGGCTGCCTGGTCAAGGACTACTTCCCCGAACCGGTGACGGTGTCGTGGAACTCAGGCGCCCTGACCAGCGGCGTGCACACCTTCCCGGCTGTCCTACAGTCCTCAGGACTCTACTCCCTCAGCAGCGTGGTGACCGTGCCCTCCAGCAGCTTGGGCACCCAGACCTACATCTGCAACGTGAATCACAAGCCCAGCAACACCAAGGTGGACAAGAAAGTTGAGCCCAAATCTTGTGACAAAACTCACACATGCCCACCGTGCCCAGCACCTGAACTCCTGGGGGGACCGTCAGTCTTCCTCTTCCCCCCAAAACCCAAGGACACCCTCATGATCTCCCGGACCCCTGAGGTCACATGCGTGGTGGTGGACGTGAGCCACGAAGACCCTGAGGTCAAGTTCAACTGGTACGTGGACGGCGTGGAGGTGCATAATGCCAAGACAAAGCCGCGGGAGGAGCAGTACAACAGCACGTACCGTGTGGTCAGCGTCCTCACCGTCCTGCACCAGGACTGGCTGAATGGCAAGGAGTACAAGTGCAAGGTGTCCAACAAAGCCCTCCCAGCCCCCATCGAGAAAACCATCTCCAAAGCCAAAGGGCAGCCCCGAGAACCACAGGTGTACACCCTGCCCCCATCCCGGGAGGAGATGACCAAGAACCAGGTCAGCCTGACCTGCCTGGTCAAAGGCTTCTATCCCAGCGACATCGCCGTGGAGTGGGAGAGCAATGGGCAGCCGGAGAACAACTACAAGACCACGCCTCCCGTGCTGGACTCCGACGGCTCCTTCTTCCTCTATAGCAAGCTCACCGTGGACAAGAGCAGGTGGCAGCAGGGGAACGTCTTCTCATGCTCCGTGATGCATGAGGCTCTGCACAACCACTACACGCAGAAGAGCCTCTCCCTGTCTCCGGGCAAATAG

SEQ ID NO: 603 - DNA, 645 bp, synthetic construct
  misc_feature 1..645: note = Synthetic Peptide
  source 1..645: mol_type = other DNA
gaaattgtgttgacgcagtctccaggcaccctgtctttgtctccaggggaaagagccaccctctcctgcagggccagtcagagtgttagcagcggctccttagcctggtaccagcagaaacttggccaggctcccaggctcctcatctatggtgcatccagcagggccactggcatcccagacaggttcagtggcagtgggtctgggacagacttcactctcaccatcagcagcctggagcctgaagattttgcagtgtattactgtcaacagtatggtagctcacggacgttcggccaagggaccaaggtggagctcaaacgaacggtggctgcaccatctgtcttcatcttcccgccatctgatgagcagttgaaatctggaactgcctctgttgtgtgcctgctgaataacttctatcccagagaggccaaagtacagtggaaggtggataacgccctccaatcgggtaactcccaggagagtgtcacagagcaggacagcaaggacagcacctacagcctcagcagcaccctgacgctgagcaaagcagactacgagaaacacaaagtctacgcctgcgaagtcacccatcagggcctgagctcgcccgtcacaaagagcttcaacaggggagagtgttag

SEQ ID NO: 604 - DNA, 1359 bp, synthetic construct
  misc_feature 1..1359: note = Synthetic Peptide
  source 1..1359: mol_type = other DNA
gaggtgcagctggtggagtctgggggaggcttggtaaagcctggggggtcccttagactctcctgtgcagcctctggattcattttcagtaacgcctggatgagctgggtccgccaggctccagggaaggggctggagtgggttggccgtataaaaaggaaaactgatggtggtacaacagactacgctgcacccgtgaaaggcagattcaccatctcaagagatgattcaaaaaacacgttgtatctgctaatgaacagcctgaaaatcgaggacacagccgtgtattattgtaccgtcgtaactttggttcggggaattatctttgactactggggccagggaaccctggtcaccgtctcctcagcctccaccaagggcccatcggtcttccccctggcaccctcctccaagagcacctctgggggcacagcggccctgggctgcctggtcaaggactacttccccgaaccggtgacggtgtcgtggaactcaggcgccctgaccagcggcgtgcacaccttcccggctgtcctacagtcctcaggactctactccctcagcagcgtggtgaccgtgccctccagcagcttgggcacccagacctacatctgcaacgtgaatcacaagcccagcaacaccaaggtggacaagaaagttgagcccaaatcttgtgacaaaactcacacatgcccaccgtgcccagcacctgaactcctggggggaccgtcagtcttcctcttccccccaaaacccaaggacaccctcatgatctcccggacccctgaggtcacatgcgtggtggtggacgtgagccacgaagaccctgaggtcaagttcaactggtacgtggacggcgtggaggtgcataatgccaagacaaagccgcgggaggagcagtacaacagcacgtaccgtgtggtcagcgtcctcaccgtcctgcaccaggactggctgaatggcaaggagtacaagtgcaaggtgtccaacaaagccctcccagcccccatcgagaaaaccatctccaaagccaaagggcagccccgagaaccacaggtgtacaccctgcccccatcccgggaggagatgaccaagaaccaggtcagcctgacctgcctggtcaaaggcttctatcccagcgacatcgccgtggagtgggagagcaatgggcagccggagaacaactacaagaccacgcctcccgtgctggactccgacggctccttcttcctctatagcaagctcaccgtggacaagagcaggtggcagcaggggaacgtcttctcatgctccgtgatgcatgaggctctgcacaaccactacacgcagaagagcctctccctgtctccgggcaaatag

SEQ ID NO: 605 - DNA, 645 bp, synthetic construct
  misc_feature 1..645: note = Synthetic Peptide
  source 1..645: mol_type = other DNA
gaaattgtgttgacgcagtctccgggcaccctgtctttgtctccaggggaaagcgccaccctctcctgtagggtcagtcagagtgtcagcagcagccagttagcctggtaccagcagaaacctggccaggctcccaggctcctcatctatggtgcatccagcagggccactggcatcccagacaggttcagtggcagtgggtctgggacagacttcactctcaccatcagcagactggagcctgaagattttgcagtgtattactgtcagcagtatggtaactcacggacgttcggccaagggaccaaggtggaaatcaaacgaacggtggctgcaccatctgtcttcatcttcccgccatctgatgagcagttgaaatctggaactgcctctgttgtgtgcctgctgaataacttctatcccagagaggccaaagtacagtggaaggtggataacgccctccaatcgggtaactcccaggagagtgtcacagagcaggacagcaaggacagcacctacagcctcagcagcaccctgacgctgagcaaagcagactacgagaaacacaaagtctacgcctgcgaagtcacccatcagggcctgagctcgcccgtcacaaagagcttcaacaggggagagtgttag

SEQ ID NO: 606 - DNA, 1359 bp, synthetic construct
  misc_feature 1..1359: note = Synthetic Peptide
  source 1..1359: mol_type = other DNA
gaggtgcagctggtggagtctgggggaggcttggtaaagcctggggggtcccttagactctcctgtgcagcctctggattcattttcagtaacgcctggctgcagtgggtccgccaggctccagggaaggggctggagtgggttggccgtatcaaaaggaaaactgatcagctgacaacagactacgctgcacccgtgaaaggcagattcaccatctcaagagatgattcaaaaaacacgttgtatctgctaatgaacagcctgaaaatcgaggacacagccgtgtattattgtaccgtcgtaactagaagccggggaattatctttgactactggggccagggaaccctggtcaccgtgtcctcagcctccaccaagggcccatcggtcttccccctggcaccctcctccaagagcacctctgggggcacagcggccctgggctgcctggtcaaggactacttccccgaaccggtgacggtgtcgtggaactcaggcgccctgaccagcggcgtgcacaccttcccggctgtcctacagtcctcaggactctactccctcagcagcgtggtgaccgtgccctccagcagcttgggcacccagacctacatctgcaacgtgaatcacaagcccagcaacaccaaggtggacaagaaagttgagcccaaatcttgtgacaaaactcacacatgcccaccgtgcccagcacctgaactcctggggggaccgtcagtcttcctcttccccccaaaacccaaggacaccctcatgatctcccggacccctgaggtcacatgcgtggtggtggacgtgagccacgaagaccctgaggtcaagttcaactggtacgtggacggcgtggaggtgcataatgccaagacaaagccgcgggaggagcagtacaacagcacgtaccgtgtggtcagcgtcctcaccgtcctgcaccaggactggctgaatggcaaggagtacaagtgcaaggtgtccaacaaagccctcccagcccccatcgagaaaaccatctccaaagccaaagggcagccccgagaaccacaggtgtacaccctgcccccatcccgggaggagatgaccaagaaccaggtcagcctgacctgcctggtcaaaggcttctatcccagcgacatcgccgtggagtgggagagcaatgggcagccggagaacaactacaagaccacgcctcccgtgctggactccgacggctccttcttcctctatagcaagctcaccgtggacaagagcaggtggcagcaggggaacgtcttctcatgctccgtgatgcatgaggctctgcacaaccactacacgcagaagagcctctccctgtctccgggcaaatag

SEQ ID NO: 607 - DNA, 645 bp, synthetic construct
  misc_feature 1..645: note = Synthetic Peptide
  source 1..645: mol_type = other DNA
gaaattgtgttgacgcagtctccgggcaccctgtctttgtctccaggggaaagcgccaccctctcctgtagggtcagtcagagtgtcagcagcagccagttagcctggtaccagcagaaacctggccaggctcccaggctcctcatctatggtgcatccagcagggccactggcatcccagacaggttcagtggcagtgggtctgggacagacttcactctcaccatcagcagactggagcctgaagattttgcagtgtattactgtcagcagtatggtaacccccggacgttcggccaagggaccaaggtggaaatcaaacgaacggtggctgcaccatctgtcttcatcttcccgccatctgatgagcagttgaaatctggaactgcctctgttgtgtgcctgctgaataacttctatcccagagaggccaaagtacagtggaaggtggataacgccctccaatcgggtaactcccaggagagtgtcacagagcaggacagcaaggacagcacctacagcctcagcagcaccctgacgctgagcaaagcagactacgagaaacacaaagtctacgcctgcgaagtcacccatcagggcctgagctcgcccgtcacaaagagcttcaacaggggagagtgttag

SEQ ID NO: 608 - protein, 1359 aa, synthetic construct
  REGION 1..1359: note = Synthetic Peptide
GAGGTGCAGCTGGTGGAGTCTGGGGGAGGCTTGGTAAAGCCTGGGGGGTCCCTTAGACTCTCCTGTGCAGCCTCTGGATTCATTTTCAGTAACGCCTGGCTGCAGTGGGTCCGCCAGGCTCCAGGGAAGGGGCTGGAGTGGGTTGGCCGTATCAAAAGGAAAACTGATGCCAGCACAACAGACTACGCTGCACCCGTGAAAGGCAGATTCACCATCTCAAGAGATGATTCAAAAAACACGTTGTATCTGCTAATGAACAGCCTGAAAATCGAGGACACAGCCGTGTATTATTGTACCGTCGTAACTAGAAGCCGGGGAATTATCTTTGACTACTGGGGCCAGGGAACCCTGGTCACCGTGTCCTCAGCCTCCACCAAGGGCCCATCGGTCTTCCCCCTGGCACCCTCCTCCAAGAGCACCTCTGGGGGCACAGCGGCCCTGGGCTGCCTGGTCAAGGACTACTTCCCCGAACCGGTGACGGTGTCGTGGAACTCAGGCGCCCTGACCAGCGGCGTGCACACCTTCCCGGCTGTCCTACAGTCCTCAGGACTCTACTCCCTCAGCAGCGTGGTGACCGTGCCCTCCAGCAGCTTGGGCACCCAGACCTACATCTGCAACGTGAATCACAAGCCCAGCAACACCAAGGTGGACAAGAAAGTTGAGCCCAAATCTTGTGACAAAACTCACACATGCCCACCGTGCCCAGCACCTGAACTCCTGGGGGGACCGTCAGTCTTCCTCTTCCCCCCAAAACCCAAGGACACCCTCATGATCTCCCGGACCCCTGAGGTCACATGCGTGGTGGTGGACGTGAGCCACGAAGACCCTGAGGTCAAGTTCAACTGGTACGTGGACGGCGTGGAGGTGCATAATGCCAAGACAAAGCCGCGGGAGGAGCAGTACAACAGCACGTACCGTGTGGTCAGCGTCCTCACCGTCCTGCACCAGGACTGGCTGAATGGCAAGGAGTACAAGTGCAAGGTGTCCAACAAAGCCCTCCCAGCCCCCATCGAGAAAACCATCTCCAAAGCCAAAGGGCAGCCCCGAGAACCACAGGTGTACACCCTGCCCCCATCCCGGGAGGAGATGACCAAGAACCAGGTCAGCCTGACCTGCCTGGTCAAAGGCTTCTATCCCAGCGACATCGCCGTGGAGTGGGAGAGCAATGGGCAGCCGGAGAACAACTACAAGACCACGCCTCCCGTGCTGGACTCCGACGGCTCCTTCTTCCTCTATAGCAAGCTCACCGTGGACAAGAGCAGGTGGCAGCAGGGGAACGTCTTCTCATGCTCCGTGATGCATGAGGCTCTGCACAACCACTACACGCAGAAGAGCCTCTCCCTGTCTCCGGGCAAATAG

SEQ ID NO: 609 - DNA, 1359 bp, synthetic construct
  misc_feature 1..1359: note = Synthetic Peptide
  source 1..1359: mol_type = other DNA
gaggtgcagctggtggagtctgggggaggcttggtaaagcctggggggtcccttagactctcctgtgcagcctctggattcattttcagtaacgcctggctgcagtgggtccgccaggctccagggaaggggctggagtgggttggccgtatcaaaaggaaaactgatgccagcacaacagactacgctgcacccgtgaaaggcagattcaccatctcaagagatgattcaaaaaacacgttgtatctgctaatgaacagcctgaaaatcgaggacacagccgtgtattattgtaccgtcgtaactagaagccggggaattatctttgactactggggccagggaaccctggtcaccgtgtcctcagcctccaccaagggcccatcggtcttccccctggcaccctcctccaagagcacctctgggggcacagcggccctgggctgcctggtcaaggactacttccccgaaccggtgacggtgtcgtggaactcaggcgccctgaccagcggcgtgcacaccttcccggctgtcctacagtcctcaggactctactccctcagcagcgtggtgaccgtgccctccagcagcttgggcacccagacctacatctgcaacgtgaatcacaagcccagcaacaccaaggtggacaagaaagttgagcccaaatcttgtgacaaaactcacacatgcccaccgtgcccagcacctgaactcctggggggaccgtcagtcttcctcttccccccaaaacccaaggacaccctcatgatctcccggacccctgaggtcacatgcgtggtggtggacgtgagccacgaagaccctgaggtcaagttcaactggtacgtggacggcgtggaggtgcataatgccaagacaaagccgcgggaggagcagtacaacagcacgtaccgtgtggtcagcgtcctcaccgtcctgcaccaggactggctgaatggcaaggagtacaagtgcaaggtgtccaacaaagccctcccagcccccatcgagaaaaccatctccaaagccaaagggcagccccgagaaccacaggtgtacaccctgcccccatcccgggaggagatgaccaagaaccaggtcagcctgacctgcctggtcaaaggcttctatcccagcgacatcgccgtggagtgggagagcaatgggcagccggagaacaactacaagaccacgcctcccgtgctggactccgacggctccttcttcctctatagcaagctcaccgtggacaagagcaggtggcagcaggggaacgtcttctcatgctccgtgatgcatgaggctctgcacaaccactacacgcagaagagcctctccctgtctccgggcaaatag

SEQ ID NO: 610 - protein, 1353 aa, synthetic construct
  REGION 1..1353: note = Synthetic Peptide
CAGGTGCAGCTGGTGGAGTCTGGGGGAGGCGTGGTCCAGCCTGGGAGGTCCCTGAGACTCTCCTGTGCAGCCTCTGGATTCACCTTCAGTAGCTATGGCATGCACTGGGTCCGCCAGGCTCCAGGCAAGGGGCTGGAGTGGGTGGCAGTTATATCATATGATGGAAGTAATAAATACTATGCAGACTCCGTGAAGGGCCGATTCACCATCTCCAGAGACAATTCCAAGAACACGCTGTATCTGCAAATGAACAGCCTGAGAGCTGAGGACACGGCTGTGTATTACTGTGCGAGGGGGCGATATTTTGACTGGTTCCTCTTTGACTACTGGGGCCAGGGAACCCTGGTCACCGTCTCCTCAGCCTCCACCAAGGGCCCATCGGTCTTCCCCCTGGCACCCTCCTCCAAGAGCACCTCTGGGGGCACAGCGGCCCTGGGCTGCCTGGTCAAGGACTACTTCCCCGAACCGGTGACGGTGTCGTGGAACTCAGGCGCCCTGACCAGCGGCGTGCACACCTTCCCGGCTGTCCTACAGTCCTCAGGACTCTACTCCCTCAGCAGCGTGGTGACCGTGCCCTCCAGCAGCTTGGGCACCCAGACCTACATCTGCAACGTGAATCACAAGCCCAGCAACACCAAGGTGGACAAGAAAGTTGAGCCCAAATCTTGTGACAAAACTCACACATGCCCACCGTGCCCAGCACCTGAACTCCTGGGGGGACCGTCAGTCTTCCTCTTCCCCCCAAAACCCAAGGACACCCTCATGATCTCCCGGACCCCTGAGGTCACATGCGTGGTGGTGGACGTGAGCCACGAAGACCCTGAGGTCAAGTTCAACTGGTACGTGGACGGCGTGGAGGTGCATAATGCCAAGACAAAGCCGCGGGAGGAGCAGTACAACAGCACGTACCGTGTGGTCAGCGTCCTCACCGTCCTGCACCAGGACTGGCTGAATGGCAAGGAGTACAAGTGCAAGGTGTCCAACAAAGCCCTCCCAGCCCCCATCGAGAAAACCATCTCCAAAGCCAAAGGGCAGCCCCGAGAACCACAGGTGTACACCCTGCCCCCATCCCGGGAGGAGATGACCAAGAACCAGGTCAGCCTGACCTGCCTGGTCAAAGGCTTCTATCCCAGCGACATCGCCGTGGAGTGGGAGAGCAATGGGCAGCCGGAGAACAACTACAAGACCACGCCTCCCGTGCTGGACTCCGACGGCTCCTTCTTCCTCTATAGCAAGCTCACCGTGGACAAGAGCAGGTGGCAGCAGGGGAACGTCTTCTCATGCTCCGTGATGCATGAGGCTCTGCACAACCACTACACGCAGAAGAGCCTCTCCCTGTCTCCGGGCAAATAG

SEQ ID NO: 611 - protein, 660 aa, synthetic construct
  REGION 1..660: note = Synthetic Peptide
GATACTGTGATGACCCAGACTCCACTCTCTCTGTCCGTCACCCCTGGACAGCCGGCCTCCATCTCCTGCAAGTCTAGTCAGAGCCTCCTACATAGTGATGGAAAGACCTATTTGTTTTGGTACCTGCAGAAGCCAGGCCAGCCTCCACAGCTCCTGATCAGTGAAGTTTCCAACCGGTTCTCTGGAGTGCCAGATAGGTTCAGTGGCAGCGGGTCAGGGACAGATTTCACACTGAAAATCAGCCGTGTGGAGGCTGAGGATGTTGGGTTTTATTACTGCATGCAAAGTTTACGGCTTCCGCTCACTTTCGGCGGAGGGACCAAGGTGGAGATCAAACGAACGGTGGCTGCACCATCTGTCTTCATCTTCCCGCCATCTGATGAGCAGTTGAAATCTGGAACTGCCTCTGTTGTGTGCCTGCTGAATAACTTCTATCCCAGAGAGGCCAAAGTACAGTGGAAGGTGGATAACGCCCTCCAATCGGGTAACTCCCAGGAGAGTGTCACAGAGCAGGACAGCAAGGACAGCACCTACAGCCTCAGCAGCACCCTGACGCTGAGCAAAGCAGACTACGAGAAACACAAAGTCTACGCCTGCGAAGTCACCCATCAGGGCCTGAGCTCGCCCGTCACAAAGAGCTTCAACAGGGGAGAGTGTTAG

SEQ ID NO: 612 - protein, 1353 aa, synthetic construct
  REGION 1..1353: note = Synthetic Peptide
CAGGTGCAGCTGGTGGAGTCTGGGGGAGGCGTGGTCCAGCCTGGGAGGTCCCTGAGACTCTCCTGTGCAGCCTCTGGATTCACCTTCAGTAGCTATGGCATGCACTGGGTCCGCCAGGCTCCAGGCAAGGGGCTGGAGTGGGTGGCAGTTATCTCATATGATGGAAGTAATAAATACTATGCAGACTCCGTGAAGGGCCGATTCACCATCTCCAGAGACAATTCCAAGAACACGCTGTATCTGCAAATGAACAGCCTGAGAGCTGAGGACACGGCTGTGTATTACTGTGCGAGGGGGCGATATTTTGACTGGACCCTCTTTGACTACTGGGGCCAGGGAACCCTGGTCACCGTGTCCTCAGCCTCCACCAAGGGCCCATCGGTCTTCCCCCTGGCACCCTCCTCCAAGAGCACCTCTGGGGGCACAGCGGCCCTGGGCTGCCTGGTCAAGGACTACTTCCCCGAACCGGTGACGGTGTCGTGGAACTCAGGCGCCCTGACCAGCGGCGTGCACACCTTCCCGGCTGTCCTACAGTCCTCAGGACTCTACTCCCTCAGCAGCGTGGTGACCGTGCCCTCCAGCAGCTTGGGCACCCAGACCTACATCTGCAACGTGAATCACAAGCCCAGCAACACCAAGGTGGACAAGAAAGTTGAGCCCAAATCTTGTGACAAAACTCACACATGCCCACCGTGCCCAGCACCTGAACTCCTGGGGGGACCGTCAGTCTTCCTCTTCCCCCCAAAACCCAAGGACACCCTCATGATCTCCCGGACCCCTGAGGTCACATGCGTGGTGGTGGACGTGAGCCACGAAGACCCTGAGGTCAAGTTCAACTGGTACGTGGACGGCGTGGAGGTGCATAATGCCAAGACAAAGCCGCGGGAGGAGCAGTACAACAGCACGTACCGTGTGGTCAGCGTCCTCACCGTCCTGCACCAGGACTGGCTGAATGGCAAGGAGTACAAGTGCAAGGTGTCCAACAAAGCCCTCCCAGCCCCCATCGAGAAAACCATCTCCAAAGCCAAAGGGCAGCCCCGAGAACCACAGGTGTACACCCTGCCCCCATCCCGGGAGGAGATGACCAAGAACCAGGTCAGCCTGACCTGCCTGGTCAAAGGCTTCTATCCCAGCGACATCGCCGTGGAGTGGGAGAGCAATGGGCAGCCGGAGAACAACTACAAGACCACGCCTCCCGTGCTGGACTCCGACGGCTCCTTCTTCCTCTATAGCAAGCTCACCGTGGACAAGAGCAGGTGGCAGCAGGGGAACGTCTTCTCATGCTCCGTGATGCATGAGGCTCTGCACAACCACTACACGCAGAAGAGCCTCTCCCTGTCTCCGGGCAAATAG

SEQ ID NO: 613 - DNA, 660 bp, synthetic construct
  misc_feature 1..660: note = Synthetic Peptide
  source 1..660: mol_type = other DNA
gatactgtgatgacccagactccactctctctgtccgtcacccctggacagccggcctccatctcctgcaagtctagtcagagcctcctacatagagatggaaagacctatttgttttggtacctgcagaagccaggccagcctccacagctcctgatctacgaagtttccaaccggttctctggagtgccagataggttcagtggcagcgggtcagggacagatttcacactgaaaatcagccgtgtggaggctgaggatgttggggtgtattactgcatgcaaagtttacggcttccgctcactttcggcggagggaccaaggtggagatcaaacgaacggtggctgcaccatctgtcttcatcttcccgccatctgatgagcagttgaaatctggaactgcctctgttgtgtgcctgctgaataacttctatcccagagaggccaaagtacagtggaaggtggataacgccctccaatcgggtaactcccaggagagtgtcacagagcaggacagcaaggacagcacctacagcctcagcagcaccctgacgctgagcaaagcagactacgagaaacacaaagtctacgcctgcgaagtcacccatcagggcctgagctcgcccgtcacaaagagcttcaacaggggagagtgttag

SEQ ID NO: 614 - DNA, 1353 bp, synthetic construct
  misc_feature 1..1353: note = Synthetic Peptide
  source 1..1353: mol_type = other DNA
caggtgcagctggtggagtctgggggaggcgtggtccagcctgggaggtccctgagactctcctgtgcagcctctggattcaccttcagtagctatcccatgcactgggtccgccaggctccaggcaaggggctggagtgggtggcagttatctcatatgatggaagtaataaatactatgcagactccgtgaagggccgattcaccatctccagagacaattccaagaacacgctgtatctgcaaatgaacagcctgagagctgaggacacggctgtgtattactgtgcgagggggcgatattttgactggaccctctttgactactggggccagggaaccctggtcaccgtgtcctcagcctccaccaagggcccatcggtcttccccctggcaccctcctccaagagcacctctgggggcacagcggccctgggctgcctggtcaaggactacttccccgaaccggtgacggtgtcgtggaactcaggcgccctgaccagcggcgtgcacaccttcccggctgtcctacagtcctcaggactctactccctcagcagcgtggtgaccgtgccctccagcagcttgggcacccagacctacatctgcaacgtgaatcacaagcccagcaacaccaaggtggacaagaaagttgagcccaaatcttgtgacaaaactcacacatgcccaccgtgcccagcacctgaactcctggggggaccgtcagtcttcctcttccccccaaaacccaaggacaccctcatgatctcccggacccctgaggtcacatgcgtggtggtggacgtgagccacgaagaccctgaggtcaagttcaactggtacgtggacggcgtggaggtgcataatgccaagacaaagccgcgggaggagcagtacaacagcacgtaccgtgtggtcagcgtcctcaccgtcctgcaccaggactggctgaatggcaaggagtacaagtgcaaggtgtccaacaaagccctcccagcccccatcgagaaaaccatctccaaagccaaagggcagccccgagaaccacaggtgtacaccctgcccccatcccgggaggagatgaccaagaaccaggtcagcctgacctgcctggtcaaaggcttctatcccagcgacatcgccgtggagtgggagagcaatgggcagccggagaacaactacaagaccacgcctcccgtgctggactccgacggctccttcttcctctatagcaagctcaccgtggacaagagcaggtggcagcaggggaacgtcttctcatgctccgtgatgcatgaggctctgcacaaccactacacgcagaagagcctctccctgtctccgggcaaatag

SEQ ID NO: 615 - DNA, 660 bp, synthetic construct
  misc_feature 1..660: note = Synthetic Peptide
  source 1..660: mol_type = other DNA
gatactgtgatgacccagactccactctctctgtccgtcacccctggacagccggcctccatctcctgcaagtctagtcagagcctcctacatagtgatggaaagacctatttgttttggtacctgcagaagccaggccagcctccacagctcctgatctacctgagatccaaccggttctctggagtgccagataggttcagtggcagcgggtcagggacagatttcacactgaaaatcagccgtgtggaggctgaggatgttggggtgtattactgcatgcaaagtttacggcttccgctcactttcggcggagggaccaaggtggagatcaaacgaacggtggctgcaccatctgtcttcatcttcccgccatctgatgagcagttgaaatctggaactgcctctgttgtgtgcctgctgaataacttctatcccagagaggccaaagtacagtggaaggtggataacgccctccaatcgggtaactcccaggagagtgtcacagagcaggacagcaaggacagcacctacagcctcagcagcaccctgacgctgagcaaagcagactacgagaaacacaaagtctacgcctgcgaagtcacccatcagggcctgagctcgcccgtcacaaagagcttcaacaggggagagtgttag

SEQ ID NO: 616 - DNA, 1353 bp, synthetic construct
  misc_feature 1..1353: note = Synthetic Peptide
  source 1..1353: mol_type = other DNA
caggtgcagctggtggagtctgggggaggcgtggtccagcctgggaggtccctgagactctcctgtgcagcctctggattcaccttcagtagctatggcatgcactgggtccgccaggctccaggcaaggggctggagtgggtggcagttatctcatatgatggaagtaataaatactatagcagatccgtgaagggccgattcaccatctccagagacaattccaagaacacgctgtatctgcaaatgaacagcctgagagctgaggacacggctgtgtattactgtgcgagggggcgatattttgactggttcctctttgactactggggccagggaaccctggtcaccgtgtcctcagcctccaccaagggcccatcggtcttccccctggcaccctcctccaagagcacctctgggggcacagcggccctgggctgcctggtcaaggactacttccccgaaccggtgacggtgtcgtggaactcaggcgccctgaccagcggcgtgcacaccttcccggctgtcctacagtcctcaggactctactccctcagcagcgtggtgaccgtgccctccagcagcttgggcacccagacctacatctgcaacgtgaatcacaagcccagcaacaccaaggtggacaagaaagttgagcccaaatcttgtgacaaaactcacacatgcccaccgtgcccagcacctgaactcctggggggaccgtcagtcttcctcttccccccaaaacccaaggacaccctcatgatctcccggacccctgaggtcacatgcgtggtggtggacgtgagccacgaagaccctgaggtcaagttcaactggtacgtggacggcgtggaggtgcataatgccaagacaaagccgcgggaggagcagtacaacagcacgtaccgtgtggtcagcgtcctcaccgtcctgcaccaggactggctgaatggcaaggagtacaagtgcaaggtgtccaacaaagccctcccagcccccatcgagaaaaccatctccaaagccaaagggcagccccgagaaccacaggtgtacaccctgcccccatcccgggaggagatgaccaagaaccaggtcagcctgacctgcctggtcaaaggcttctatcccagcgacatcgccgtggagtgggagagcaatgggcagccggagaacaactacaagaccacgcctcccgtgctggactccgacggctccttcttcctctatagcaagctcaccgtggacaagagcaggtggcagcaggggaacgtcttctcatgctccgtgatgcatgaggctctgcacaaccactacacgcagaagagcctctccctgtctccgggcaaatag

SEQ ID NO: 617 - DNA, 660 bp, synthetic construct
  misc_feature 1..660: note = Synthetic Peptide
  source 1..660: mol_type = other DNA
gatactgtgatgacccagactccactctctctgtccgtcacccctggacagccggcctccatctcctgcaagtctagtcagagcctcctacatagtgatggaaagacctatttgttttggtacctgcagaagccaggccagcctccacagctcctgatctacctgagctccaaccggttctctggagtgccagataggttcagtggcagcgggtcagggacagatttcacactgaaaatcagccgtgtggaggctgaggatgttggggtgtattactgcatgcaaagtttacggcttccgctcactttcggcggagggaccaaggtggagatcaaacgaacggtggctgcaccatctgtcttcatcttcccgccatctgatgagcagttgaaatctggaactgcctctgttgtgtgcctgctgaataacttctatcccagagaggccaaagtacagtggaaggtggataacgccctccaatcgggtaactcccaggagagtgtcacagagcaggacagcaaggacagcacctacagcctcagcagcaccctgacgctgagcaaagcagactacgagaaacacaaagtctacgcctgcgaagtcacccatcagggcctgagctcgcccgtcacaaagagcttcaacaggggagagtgttag

SEQ ID NO: 618 - protein, 1353 aa, synthetic construct
  REGION 1..1353: note = Synthetic Peptide
CAGGTGCAGCTGGTGGAGTCTGGGGGAGGCGTGGTCCAGCCTGGGAGGTCCCTGAGACTCTCCTGTGCAGCCTCTGGATTCACCTTCAGTAGCTATGCCATGCACTGGGTCCGCCAGGCTCCAGGCAAGGGGCTGGAGTGGGTGGCAGTTATCTCATATGATGGAAGTAATAAATACTATGCAGACTCCGTGAAGGGCCGATTCACCATCTCCAGAGACAATTCCAAGAACACGCTGTATCTGCAAATGAACAGCCTGAGAGCTGAGGACACGGCTGTGTATTACTGTGCGAGGGGGCGATATTTTGACTGGTTCCTCTTTGACTACTGGGGCCAGGGAACCCTGGTCACCGTGTCCTCAGCCTCCACCAAGGGCCCATCGGTCTTCCCCCTGGCACCCTCCTCCAAGAGCACCTCTGGGGGCACAGCGGCCCTGGGCTGCCTGGTCAAGGACTACTTCCCCGAACCGGTGACGGTGTCGTGGAACTCAGGCGCCCTGACCAGCGGCGTGCACACCTTCCCGGCTGTCCTACAGTCCTCAGGACTCTACTCCCTCAGCAGCGTGGTGACCGTGCCCTCCAGCAGCTTGGGCACCCAGACCTACATCTGCAACGTGAATCACAAGCCCAGCAACACCAAGGTGGACAAGAAAGTTGAGCCCAAATCTTGTGACAAAACTCACACATGCCCACCGTGCCCAGCACCTGAACTCCTGGGGGGACCGTCAGTCTTCCTCTTCCCCCCAAAACCCAAGGACACCCTCATGATCTCCCGGACCCCTGAGGTCACATGCGTGGTGGTGGACGTGAGCCACGAAGACCCTGAGGTCAAGTTCAACTGGTACGTGGACGGCGTGGAGGTGCATAATGCCAAGACAAAGCCGCGGGAGGAGCAGTACAACAGCACGTACCGTGTGGTCAGCGTCCTCACCGTCCTGCACCAGGACTGGCTGAATGGCAAGGAGTACAAGTGCAAGGTGTCCAACAAAGCCCTCCCAGCCCCCATCGAGAAAACCATCTCCAAAGCCAAAGGGCAGCCCCGAGAACCACAGGTGTACACCCTGCCCCCATCCCGGGAGGAGATGACCAAGAACCAGGTCAGCCTGACCTGCCTGGTCAAAGGCTTCTATCCCAGCGACATCGCCGTGGAGTGGGAGAGCAATGGGCAGCCGGAGAACAACTACAAGACCACGCCTCCCGTGCTGGACTCCGACGGCTCCTTCTTCCTCTATAGCAAGCTCACCGTGGACAAGAGCAGGTGGCAGCAGGGGAACGTCTTCTCATGCTCCGTGATGCATGAGGCTCTGCACAACCACTACACGCAGAAGAGCCTCTCCCTGTCTCCGGGCAAATAG

SEQ ID NO: 619 - DNA, 660 bp, synthetic construct
  misc_feature 1..660: note = Synthetic Peptide
  source 1..660: mol_type = other DNA
gatactgtgatgacccagactccactctctctgtccgtcacccctggacagccggcctccatctcctgcaagtctagtcagagcctcctacatagtgatggaaagacctatttgttttggtacctgcagaagccaggccagcctccacagctcctgatctacctgacctccaaccggttctctggagtgccagataggttcagtggcagcgggtcagggacagatttcacactgaaaatcagccgtgtggaggctgaggatgttggggtgtattactgcatgcaaagtttacggcttccgctcactttcggcggagggaccaaggtggagatcaaacgaacggtggctgcaccatctgtcttcatcttcccgccatctgatgagcagttgaaatctggaactgcctctgttgtgtgcctgctgaataacttctatcccagagaggccaaagtacagtggaaggtggataacgccctccaatcgggtaactcccaggagagtgtcacagagcaggacagcaaggacagcacctacagcctcagcagcaccctgacgctgagcaaagcagactacgagaaacacaaagtctacgcctgcgaagtcacccatcagggcctgagctcgcccgtcacaaagagcttcaacaggggagagtgttag

SEQ ID NO: 620 - DNA, 1353 bp, synthetic construct
  misc_feature 1..1353: note = Synthetic Peptide
  source 1..1353: mol_type = other DNA
caggtgcagctggtggagtctgggggaggcgtggtccagcctgggaggtccctgagactctcctgtgcagcctctggattcaccttcagtagctatcccgtgcactgggtccgccaggctccaggcaaggggctggagtgggtggcagttatctcatatgatggaagtaataaatactatgcagactccgtgaagggccgattcaccatctccagagacaattccaagaacacgctgtatctgcaaatgaacagcctgagagctgaggacacggctgtgtattactgtgcgagggggcgatattttgactggttcctctttgactactggggccagggaaccctggtcaccgtgtcctcagcctccaccaagggcccatcggtcttccccctggcaccctcctccaagagcacctctgggggcacagcggccctgggctgcctggtcaaggactacttccccgaaccggtgacggtgtcgtggaactcaggcgccctgaccagcggcgtgcacaccttcccggctgtcctacagtcctcaggactctactccctcagcagcgtggtgaccgtgccctccagcagcttgggcacccagacctacatctgcaacgtgaatcacaagcccagcaacaccaaggtggacaagaaagttgagcccaaatcttgtgacaaaactcacacatgcccaccgtgcccagcacctgaactcctggggggaccgtcagtcttcctcttccccccaaaacccaaggacaccctcatgatctcccggacccctgaggtcacatgcgtggtggtggacgtgagccacgaagaccctgaggtcaagttcaactggtacgtggacggcgtggaggtgcataatgccaagacaaagccgcgggaggagcagtacaacagcacgtaccgtgtggtcagcgtcctcaccgtcctgcaccaggactggctgaatggcaaggagtacaagtgcaaggtgtccaacaaagccctcccagcccccatcgagaaaaccatctccaaagccaaagggcagccccgagaaccacaggtgtacaccctgcccccatcccgggaggagatgaccaagaaccaggtcagcctgacctgcctggtcaaaggcttctatcccagcgacatcgccgtggagtgggagagcaatgggcagccggagaacaactacaagaccacgcctcccgtgctggactccgacggctccttcttcctctatagcaagctcaccgtggacaagagcaggtggcagcaggggaacgtcttctcatgctccgtgatgcatgaggctctgcacaaccactacacgcagaagagcctctccctgtctccgggcaaatag

SEQ ID NO: 621 - DNA, 660 bp, synthetic construct; identical to SEQ ID NO: 619
  misc_feature 1..660: note = Synthetic Peptide
  source 1..660: mol_type = other DNA

SEQ ID NO: 622 - DNA, 1353 bp, synthetic construct
  misc_feature 1..1353: note = Synthetic Peptide
  source 1..1353: mol_type = other DNA
caggtgcagctggtggagtctgggggaggcgtggtccagcctgggaggtccctgagactctcctgtgcagcctctggattcaccttcagtagctatggcatgcactgggtccgccaggctccaggcaaggggctggagtgggtggcagttatctcatatgatggaagtaataaatactatgcagactccgtgaagggccgattcaccatctccagagacaattccaagaacacgctgtatctgcaaatgaacagcctgagagctgaggacacggctgtgtattactgtgcgagggggcgatattttgactggaccctctttgactactggggccagggaaccctggtcaccgtgtcctcagcctccaccaagggcccatcggtcttccccctggcaccctcctccaagagcacctctgggggcacagcggccctgggctgcctggtcaaggactacttccccgaaccggtgacggtgtcgtggaactcaggcgccctgaccagcggcgtgcacaccttcccggctgtcctacagtcctcaggactctactccctcagcagcgtggtgaccgtgccctccagcagcttgggcacccagacctacatctgcaacgtgaatcacaagcccagcaacaccaaggtggacaagaaagttgagcccaaatcttgtgacaaaactcacacatgcccaccgtgcccagcacctgaactcctggggggaccgtcagtcttcctcttccccccaaaacccaaggacaccctcatgatctcccggacccctgaggtcacatgcgtggtggtggacgtgagccacgaagaccctgaggtcaagttcaactggtacgtggacggcgtggaggtgcataatgccaagacaaagccgcgggaggagcagtacaacagcacgtaccgtgtggtcagcgtcctcaccgtcctgcaccaggactggctgaatggcaaggagtacaagtgcaaggtgtccaacaaagccctcccagcccccatcgagaaaaccatctccaaagccaaagggcagccccgagaaccacaggtgtacaccctgcccccatcccgggaggagatgaccaagaaccaggtcagcctgacctgcctggtcaaaggcttctatcccagcgacatcgccgtggagtgggagagcaatgggcagccggagaacaactacaagaccacgcctcccgtgctggactccgacggctccttcttcctctatagcaagctcaccgtggacaagagcaggtggcagcaggggaacgtcttctcatgctccgtgatgcatgaggctctgcacaaccactacacgcagaagagcctctccctgtctccgggcaaatag

SEQ ID NO: 623 - DNA, 660 bp, synthetic construct
  misc_feature 1..660: note = Synthetic Peptide
  source 1..660: mol_type = other DNA
gatactgtgatgacccagactccactctctctgtccgtcacccctggacagccggcctccatctcctgcaagtctagtcagagcctcctacatagagatgccagaacctatttgttttggtacctgcagaagccaggccagcctccacagctcctgatctacgaagtttccaaccggttctctggagtgccagataggttcagtggcagcgggtcagggacagatttcacactgaaaatcagccgtgtggaggctgaggatgttggggtgtattactgcctgcaaagtttacggcttccgctcactttcggcggagggaccaaggtggagatcaaacgaacggtggctgcaccatctgtcttcatcttcccgccatctgatgagcagttgaaatctggaactgcctctgttgtgtgcctgctgaataacttctatcccagagaggccaaagtacagtggaaggtggataacgccctccaatcgggtaactcccaggagagtgtcacagagcaggacagcaaggacagcacctacagcctcagcagcaccctgacgctgagcaaagcagactacgagaaacacaaagtctacgcctgcgaagtcacccatcagggcctgagctcgcccgtcacaaagagcttcaacaggggagagtgttag

SEQ ID NO: 624 - DNA, 1353 bp, synthetic construct; identical to SEQ ID NO: 616
  misc_feature 1..1353: note = Synthetic Peptide
  source 1..1353: mol_type = other DNA

SEQ ID NO: 625 - DNA, 660 bp, synthetic construct
  misc_feature 1..660: note = Synthetic Peptide
  source 1..660: mol_type = other DNA
gatactgtgatgacccagactccactctctctgtccgtcacccctggacagccggcctccatctcctgcaagtctagtcagagcctcctacatagtgatgccagaacctatttgttttggtacctgcagaagccaggccagcctccacagctcctgatctacctgagctccaaccggttctctggagtgccagataggttcagtggcagcgggtcagggacagatttcacactgaaaatcagccgtgtggaggctgaggatgttggggtgtattactgcctgcaaagtttacggcttccgctcactttcggcggagggaccaaggtggagatcaaacgaacggtggctgcaccatctgtcttcatcttcccgccatctgatgagcagttgaaatctggaactgcctctgttgtgtgcctgctgaataacttctatcccagagaggccaaagtacagtggaaggtggataacgccctccaatcgggtaactcccaggagagtgtcacagagcaggacagcaaggacagcacctacagcctcagcagcaccctgacgctgagcaaagcagactacgagaaacacaaagtctacgcctgcgaagtcacccatcagggcctgagctcgcccgtcacaaagagcttcaacaggggagagtgttag

SEQ ID NO: 626 - DNA, 1353 bp, synthetic construct; identical to SEQ ID NO: 614
  misc_feature 1..1353: note = Synthetic Peptide
  source 1..1353: mol_type = other DNA

SEQ ID NO: 627 - DNA, 660 bp, synthetic construct
  misc_feature 1..660: note = Synthetic Peptide
  source 1..660: mol_type = other DNA
gatactgtgatgacccagactccactctctctgtccgtcacccctggacagccggcctccatctcctgcaagtctagtcagagcctcctacatagtgatgccagaacctatttgttttggtacctgcagaagccaggccagcctccacagctcctgatctacctgagatccaaccggttctctggagtgccagataggttcagtggcagcgggtcagggacagatttcacactgaaaatcagccgtgtggaggctgaggatgttggggtgtattactgcctgcaaagtttacggcttccgctcactttcggcggagggaccaaggtggagatcaaacgaacggtggctgcaccatctgtcttcatcttcccgccatctgatgagcagttgaaatctggaactgcctctgttgtgtgcctgctgaataacttctatcccagagaggccaaagtacagtggaaggtggataacgccctccaatcgggtaactcccaggagagtgtcacagagcaggacagcaaggacagcacctacagcctcagcagcaccctgacgctgagcaaagcagactacgagaaacacaaagtctacgcctgcgaagtcacccatcagggcctgagctcgcccgtcacaaagagcttcaacaggggagagtgttag

SEQ ID NO: 628 - DNA, 1353 bp, synthetic construct
  misc_feature 1..1353: note = Synthetic Peptide
  source 1..1353: mol_type = other DNA
caggtgcagctggtggagtctgggggaggcgtggtccagcctgggaggtccctgagactctcctgtgcagcctctggattcaccttcagtagctatgccatgcactgggtccgccaggctccaggcaaggggctggagtgggtggcagttatctcatatgatggaagtaataaatactatgcagactccgtgaagggccgattcaccatctccagagacaattccaagaacacgctgtatctgcaaatgaacagcctgagagctgaggacacggctgtgtattactgtgcgagggggcgatattttgactggttcctctttgactactggggccagggaaccctggtcaccgtgtcctcagcctccaccaagggcccatcggtcttccccctggcaccctcctccaagagcacctctgggggcacagcggccctgggctgcctggtcaaggactacttccccgaaccggtgacggtgtcgtggaactcaggcgccctgaccagcggcgtgcacaccttcccggctgtcctacagtcctcaggactctactccctcagcagcgtggtgaccgtgccctccagcagcttgggcacccagacctacatctgcaacgtgaatcacaagcccagcaacaccaaggtggacaagaaagttgagcccaaatcttgtgacaaaactcacacatgcccaccgtgcccagcacctgaactcctggggggaccgtcagtcttcctcttccccccaaaacccaaggacaccctcatgatctcccggacccctgaggtcacatgcgtggtggtggacgtgagccacgaagaccctgaggtcaagttcaactggtacgtggacggcgtggaggtgcataatgccaagacaaagccgcgggaggagcagtacaacagcacgtaccgtgtggtcagcgtcctcaccgtcctgcaccaggactggctgaatggcaaggagtacaagtgcaaggtgtccaacaaagccctcccagcccccatcgagaaaaccatctccaaagccaaagggcagccccgagaaccacaggtgtacaccctgcccccatcccgggaggagatgaccaagaaccaggtcagcctgacctgcctggtcaaaggcttctatcccagcgacatcgccgtggagtgggagagcaatgggcagccggagaacaactacaagaccacgcctcccgtgctggactccgacggctccttcttcctctatagcaagctcaccgtggacaagagcaggtggcagcaggggaacgtcttctcatgctccgtgatgcatgaggctctgcacaaccactacacgcagaagagcctctccctgtctccgggcaaatag

SEQ ID NO: 629 - DNA, 660 bp, synthetic construct
  misc_feature 1..660: note = Synthetic Peptide
  source 1..660: mol_type = other DNA
gatactgtgatgacccagactccactctctctgtccgtcacccctggacagccggcctccatctcctgcaagtctagtcagagcctcctacatagtgatgccagaacctatttgttttggtacctgcagaagccaggccagcctccacagctcctgatctacctgacctccaaccggttctctggagtgccagataggttcagtggcagcgggtcagggacagatttcacactgaaaatcagccgtgtggaggctgaggatgttggggtgtattactgcctgcaaagtttacggcttccgctcactttcggcggagggaccaaggtggagatcaaacgaacggtggctgcaccatctgtcttcatcttcccgccatctgatgagcagttgaaatctggaactgcctctgttgtgtgcctgctgaataacttctatcccagagaggccaaagtacagtggaaggtggataacgccctccaatcgggtaactcccaggagagtgtcacagagcaggacagcaaggacagcacctacagcctcagcagcaccctgacgctgagcaaagcagactacgagaaacacaaagtctacgcctgcgaagtcacccatcagggcctgagctcgcccgtcacaaagagcttcaacaggggagagtgttag

SEQ ID NO: 630 - DNA, 1353 bp, synthetic construct
  misc_feature 1..1353: note = Synthetic Peptide
  source 1..1353: mol_type = other DNA
caggtgcagctggtggagtctgggggaggcgtggtccagcctgggaggtccctgagactctcctgtgaagcctctggattcaccttcagtagctatgtcatgcactgggtccgccaggctccaggcaaggggctggagtgggtgtcagttatatcatatgatggaagtagtcaatactatacagactccgtgaagggccgattcaccatctccagagacaattccaagaatacgctgaatctgcaaatgaacagcctgagagctgaggacacggctgtgtattactgtgtgagaggccgtttggccactgctatcctctttgactactggggccagggaaccctggtcaccgtctcctcagcctccaccaagggcccatcggtcttccccctggcaccctcctccaagagcacctctgggggcacagcggccctgggctgcctggtcaaggactacttccccgaaccggtgacggtgtcgtggaactcaggcgccctgaccagcggcgtgcacaccttcccggctgtcctacagtcctcaggactctactccctcagcagcgtggtgaccgtgccctccagcagcttgggcacccagacctacatctgcaacgtgaatcacaagcccagcaacaccaaggtggacaagaaagttgagcccaaatcttgtgacaaaactcacacatgcccaccgtgcccagcacctgaactcctggggggaccgtcagtcttcctcttccccccaaaacccaaggacaccctcatgatctcccggacccctgaggtcacatgcgtggtggtggacgtgagccacgaagaccctgaggtcaagttcaactggtacgtggacggcgtggaggtgcataatgccaagacaaagccgcgggaggagcagtacaacagcacgtaccgtgtggtcagcgtcctcaccgtcctgcaccaggactggctgaatggcaaggagtacaagtgcaaggtgtccaacaaagccctcccagcccccatcgagaaaaccatctccaaagccaaagggcagccccgagaaccacaggtgtacaccctgcccccatcccgggaggagatgaccaagaaccaggtcagcctgacctgcctggtcaaaggcttctatcccagcgacatcgccgtggagtgggagagcaatgggcagccggagaacaactacaagaccacgcctcccgtgctggactccgacggctccttcttcctctatagcaagctcaccgtggacaagagcaggtggcagcaggggaacgtcttctcatgctccgtgatgcatgaggctctgcacaaccactacacgcagaagagcctctccctgtctccgggcaaatag

SEQ ID NO: 631 - DNA, 660 bp, synthetic construct
  misc_feature 1..660: note = Synthetic Peptide
  source 1..660: mol_type = other DNA
gatattttgatgacccagactccactctctctgtccgtcacccctggacagccggcctccatctcctgcaagtctagccagagcctcctatatagtgatggaaagacctatttattttggtacctgcagaggccaggccaacctccacagctcctgatctatgaagtttccaaccggttctctggagtgccagataggttcagtggcagcgggtcagggacagatttcacactgaaaatcagccgggtggaggctgaggatgttgggatttattactgcatgcaaagtataaaacttcctctcactttcggcggagggaccaaggtggagatcaaacgaacggtggctgcaccatctgtcttcatcttcccgccatctgatgagcagttgaaatctggaactgcctctgttgtgtgcctgctgaataacttctatcccagagaggccaaagtacagtggaaggtggataacgccctccaatcgggtaactcccaggagagtgtcacagagcaggacagcaaggacagcacctacagcctcagcagcaccctgacgctgagcaaagcagactacgagaaacacaaagtctacgcctgcgaagtcacccatcagggcctgagctcgcccgtcacaaagagcttcaacaggggagagtgttag

SEQ ID NO: 632 - DNA, 1353 bp, synthetic construct
  misc_feature 1..1353: note = Synthetic Peptide
  source 1..1353: mol_type = other DNA
caggtgcagctggtggagtctgggggaggcgtggtccagcctgggaggtccctgagactctcctgtgaagcctctggattcaccttcagtagctatgtcatgcactgggtccgccaggctccaggcaaggggctggagtgggtgtcagttatctcatatgatggaagtagacaatactatacagactccgtgaagggccgattcaccatctccagagacaattccaagaatacgctgaatctgcaaatgaacagcctgagagctgaggacacggctgtgtattactgtgtgagaggccgtttggccactagccccctctttgactactggggccagggaaccctggtcaccgtgtcctcagcctccaccaagggcccatcggtcttccccctggcaccctcctccaagagcacctctgggggcacagcggccctgggctgcctggtcaaggactacttccccgaaccggtgacggtgtcgtggaactcaggcgccctgaccagcggcgtgcacaccttcccggctgtcctacagtcctcaggactctactccctcagcagcgtggtgaccgtgccctccagcagcttgggcacccagacctacatctgcaacgtgaatcacaagcccagcaacaccaaggtggacaagaaagttgagcccaaatcttgtgacaaaactcacacatgcccaccgtgcccagcacctgaactcctggggggaccgtcagtcttcctcttccccccaaaacccaaggacaccctcatgatctcccggacccctgaggtcacatgcgtggtggtggacgtgagccacgaagaccctgaggtcaagttcaactggtacgtggacggcgtggaggtgcataatgccaagacaaagccgcgggaggagcagtacaacagcacgtaccgtgtggtcagcgtcctcaccgtcctgcaccaggactggctgaatggcaaggagtacaagtgcaaggtgtccaacaaagccctcccagcccccatcgagaaaaccatctccaaagccaaagggcagccccgagaaccacaggtgtacaccctgcccccatcccgggaggagatgaccaagaaccaggtcagcctgacctgcctggtcaaaggcttctatcccagcgacatcgccgtggagtgggagagcaatgggcagccggagaacaactacaagaccacgcctcccgtgctggactccgacggctccttcttcctctatagcaagctcaccgtggacaagagcaggtggcagcaggggaacgtcttctcatgctccgtgatgcatgaggctctgcacaaccactacacgcagaagagcctctccctgtctccgggcaaatag

SEQ ID NO: 633 - DNA, 660 bp, synthetic construct
  misc_feature 1..660: note = Synthetic Peptide
  source 1..660: mol_type = other DNA
gatattttgatgacccagactccactctctctgtccgtcacccctggacagccggcctccatctcctgcaagtctagccagagcctcctatatagtgatggaaagacctatttattttggtacctgcagaggccaggccaacctccacagctcctgatctatgaagtttccaaccggctgtctggagtgccagataggttcagtggcagcgggtcagggacagatttcacactgaaaatcagccgggtggaggctgaggatgttgggatttattactgcatgcaaagtatcaaacttcctctcactttcggcggagggaccaaggtggagatcaaacgaacggtggctgcaccatctgtcttcatcttcccgccatctgatgagcagttgaaatctggaactgcctctgttgtgtgcctgctgaataacttctatcccagagaggccaaagtacagtggaaggtggataacgccctccaatcgggtaactcccaggagagtgtcacagagcaggacagcaaggacagcacctacagcctcagcagcaccctgacgctgagcaaagcagactacgagaaacacaaagtctacgcctgcgaagtcacccatcagggcctgagctcgcccgtcacaaagagcttcaacaggggagagtgttag

SEQ ID NO: 634 - DNA, 1353 bp, synthetic construct
  misc_feature 1..1353: note = Synthetic Peptide
  source 1..1353: mol_type = other DNA
caggtgcagctggtggagtctgggggaggcgtggtccagcctgggaggtccctgagactctcctgtgaagcctctggattcaccttcagtagctatgtcatgcactgggtccgccaggctccaggcaaggggctggagtgggtgtcagttatctcatatgatggaagtagagcctactatacagactccgtgaagggccgattcaccatctccagagacaattccaagaatacgctgaatctgcaaatgaacagcctgagagctgaggacacggctgtgtattactgtgtgagaggccgtttggccactgctatcaagctggactactggggccagggaaccctggtcaccgtgtcctcagcctccaccaagggcccatcggtcttccccctggcaccctcctccaagagcacctctgggggcacagcggccctgggctgcctggtcaaggactacttccccgaaccggtgacggtgtcgtggaactcaggcgccctgaccagcggcgtgcacaccttcccggctgtcctacagtcctcaggactctactccctcagcagcgtggtgaccgtgccctccagcagcttgggcacccagacctacatctgcaacgtgaatcacaagcccagcaacaccaaggtggacaagaaagttgagcccaaatcttgtgacaaaactcacacatgcccaccgtgcccagcacctgaactcctggggggaccgtcagtcttcctcttccccccaaaacccaaggacaccctcatgatctcccggacccctgaggtcacatgcgtggtggtggacgtgagccacgaagaccctgaggtcaagttcaactggtacgtggacggcgtggaggtgcataatgccaagacaaagccgcgggaggagcagtacaacagcacgtaccgtgtggtcagcgtcctcaccgtcctgcaccaggactggctgaatggcaaggagtacaagtgcaaggtgtccaacaaagccctcccagcccccatcgagaaaaccatctccaaagccaaagggcagccccgagaaccacaggtgtacaccctgcccccatcccgggaggagatgaccaagaaccaggtcagcctgacctgcctggtcaaaggcttctatcccagcgacatcgccgtggagtgggagagcaatgggcagccggagaacaactacaagaccacgcctcccgtgctggactccgacggctccttcttcctctatagcaagctcaccgtggacaagagcaggtggcagcaggggaacgtcttctcatgctccgtgatgcatgaggctctgcacaaccactacacgcagaagagcctctccctgtctccgggcaaatag

SEQ ID NO: 635 - DNA, 660 bp, synthetic construct
  misc_feature 1..660: note = Synthetic Peptide
  source 1..660: mol_type = other DNA
gatattttgatgacccagactccactctctctgtccgtcacccctggacagccggcctccatctcctgcaagtctagccagagcctcctatatagtgatggaaagacctatttattttggtacctgcagaggccaggccaacctccacagctcctgatctatgaagtttccaaccggttctctggagtgccagataggttcagtggcagcgggtcagggacagatttcacactgaaaatcagccgggtggaggctgaggatgttgggatttattactgcatgcaaaccctgaaacttcctctcactttcggcggagggaccaaggtggagatcaaacgaacggtggctgcaccatctgtcttcatcttcccgccatctgatgagcagttgaaatctggaactgcctctgttgtgtgcctgctgaataacttctatcccagagaggccaaagtacagtggaaggtggataacgccctccaatcgggtaactcccaggagagtgtcacagagcaggacagcaaggacagcacctacagcctcagcagcaccctgacgctgagcaaagcagactacgagaaacacaaagtctacgcctgcgaagtcacccatcagggcctgagctcgcccgtcacaaagagcttcaacaggggagagtgttag

SEQ ID NO: 636 - protein, 449 aa, synthetic construct
  REGION 1..449: note = Synthetic Peptide
EVQLLESGGGLVQPGGSLRLSCAASGFTFSSYDMSWVRQAPGKGLEWVSLISGGGSQTYYAESVKGRFTISRDNSKNTLYLQMNSLRAEDTAVYFCASPSGHYFYAMDVWGQGTTVTVSSASTKGPSVFPLAPSSKSTSGGTAALGCLVKDYFPEPVTVSWNSGALTSGVHTFPAVLQSSGLYSLSSVVTVPSSSLGTQTYICNVNHKPSNTKVDKKVEPKSCDKTHTCPPCPAPELLGGPSVFLFPPKPKDTLMISRTPEVTCVVVDVSHEDPEVKFNWYVDGVEVHNAKTKPCEEQYGSTYRCVSVLTVLHQDWLNGKEYKCKVSNKALPAPIEKTISKAKGQPREPQVYTLPPSREEMTKNQVSLTCLVKGFYPSDIAVEWESNGQPENNYKTTPPVLDSDGSFFLYSKLTVDKSRWQQGNVFSCSVMHEALHNHYTQKSLSLSPG

SEQ ID NO: 637 - protein, 16 aa, synthetic construct
  REGION 1..16: note = Synthetic Peptide
KYSQSLLHSDGKTYLF

SEQ ID NO: 638 - protein, 7 aa, synthetic construct
  REGION 1..7: note = Synthetic Peptide
EVSNRFS

SEQ ID NO: 639 - protein, 9 aa, synthetic construct
  REGION 1..9: note = Synthetic Peptide
MQTLKLPLT

SEQ ID NO: 640 - protein, 5 aa, synthetic construct
  REGION 1..5: note = Synthetic Peptide
NYGMH

SEQ ID NO: 641 - protein, 17 aa, synthetic construct
  REGION 1..17: note = Synthetic Peptide
VISYDGSRNFYADSVKG

SEQ ID NO: 642 - protein, 9 aa, synthetic construct
  REGION 1..9: note = Synthetic Peptide
AGGNGRFDY

SEQ ID NO: 643 - protein, 113 aa, synthetic construct
  REGION 1..113: note = Synthetic Peptide
DIVMTQTPLSLSVTPGQPASISCKYSQSLLHSDGKTYLFWYLQKPGQSPQLLIYEVSNRFSGVPDRFSGSGSGTDFTLKISRVEAEDVGVYYCMQTLKLPLTFGGGTKVEIKR

SEQ ID NO: 644 - protein, 118 aa, synthetic construct
  REGION 1..118: note = Synthetic Peptide
QVQLVESGGGVVQPGRSLRLSCAASGFTFSNYGMHWVRQAPGKGLEWVAVISYDGSRNFYADSVKGRFTISRDNSKNTLYLQMNSLRAEDTAVYYCARAGGNGRFDYWGQGTLVTVSS

SEQ ID NO: 645 - protein, 219 aa, synthetic construct
  REGION 1..219: note = Synthetic Peptide
DIVMTQTPLSLSVTPGQPASISCKYSQSLLHSDGKTYLFWYLQKPGQSPQLLIYEVSNRFSGVPDRFSGSGSGTDFTLKISRVEAEDVGVYYCMQTLKLPLTFGGGTKVEIKRADAAPTVSIFPPSSEQLTSGGASVVCFLNNFYPKDINVKWKIDGSERQNGVLNSWTDQDSKDSTYSMSSTLTLTKDEYERHNSYTCEATHKTSTSPIVKSFNRNEC

SEQ ID NO: 646 - protein, 448 aa, synthetic construct
  REGION 1..448: note = Synthetic Peptide
QVQLVESGGGVVQPGRSLRLSCAASGFTFSNYGMHWVRQAPGKGLEWVAVISYDGSRNFYADSVKGRFTISRDNSKNTLYLQMNSLRAEDTAVYYCARAGGNGRFDYWGQGTLVTVSSAKTTAPSVYPLAPVCGDTTGSSVTLGCLVKGYFPEPVTLTWNSGSLSSGVHTFPAVLQSDLYTLSSSVTVTSSTWPSQSITCNVAHPASSTKVDKKIEPRGPTIKPCPPCKCPAPNLLGGPSVFIFPPKIKDVLMISLSPIVTCVVVDVSEDDPDVQISWFVNNVEVHTAQTQTHREDYNSTLRVVSALPIQHQDWMSGKEFKCKVNNKDLPAPIERTISKPKGSVRAPQVYVLPPPEEEMTKKQVTLTCMVTDFMPEDIYVEWTNNGKTELNYKNTEPVLDSDGSYFMYSKLRVEKKNWVERNSYSCSVVHEGLHNHHTTKSFSRTPGK

SEQ ID NO: 647 - protein, 5 aa, synthetic construct
  REGION 1..5: note = Synthetic Peptide
NNGMH

SEQ ID NO: 648 - protein, 17 aa, synthetic construct
  REGION 1..17: note = Synthetic Peptide
VISNDGSNKYYADSVKG

SEQ ID NO: 649 - protein, 19 aa, synthetic construct
  REGION 1..19: note = Synthetic Peptide
VYYGSGIYYKNRNYYGMDV

SEQ ID NO: 650 - protein, 11 aa, synthetic construct
  REGION 1..11: note = Synthetic Peptide
GGNNIGSQNVH

SEQ ID NO: 651 - protein, 7 aa, synthetic construct
  REGION 1..7: note = Synthetic Peptide
RDSNRPS

SEQ ID NO: 652 - protein, 9 aa, synthetic construct
  REGION 1..9: note = Synthetic Peptide
QVWDSSTVV

SEQ ID NO: 653 - protein, 5 aa, synthetic construct
  REGION 1..5: note = Synthetic Peptide
NYGMH

SEQ ID NO: 654 - protein, 17 aa, synthetic construct
  REGION 1..17: note = Synthetic Peptide
VISYDGSNKYYADSVKG

SEQ ID NO: 655 - protein, 19 aa, synthetic construct
  REGION 1..19: note = Synthetic Peptide
VYYGSGIYYKKRYYYGMDV

SEQ ID NO: 656 - protein, 11 aa, synthetic construct
  REGION 1..11: note = Synthetic Peptide
GGHNIGSKGVH

SEQ ID NO: 657 - protein, 7 aa, synthetic construct
  REGION 1..7: note = Synthetic Peptide
RNSNRPS

SEQ ID NO: 658 - protein, 9 aa, synthetic construct
  REGION 1..9: note = Synthetic Peptide
QVWDSSTVV

SEQ ID NO: 659 - protein, 5 aa, synthetic construct
  REGION 1..5: note = Synthetic Peptide
NYGMH

SEQ ID NO: 660 - protein, 17 aa, synthetic construct
  REGION 1..17: note = Synthetic Peptide
VISYDGSNKYYADSVKG

SEQ ID NO: 661 - protein, 19 aa, synthetic construct
  REGION 1..19: note = Synthetic Peptide
VYYGSGSYYKKRYYYGMDV

SEQ ID NO: 662 - protein, 11 aa, synthetic construct
  REGION 1..11: note = Synthetic Peptide
GGNNIGSQNVH

SEQ ID NO: 663 - protein, 7 aa, synthetic construct
  REGION 1..7: note = Synthetic Peptide
RDSNRPS

SEQ ID NO: 664 - protein, 9 aa, synthetic construct
  REGION 1..9: note = Synthetic Peptide
QVWDSSTVV

SEQ ID NO: 665 - protein, 5 aa, synthetic construct
  REGION 1..5: note = Synthetic Peptide
SSGMH

SEQ ID NO: 666 - protein, 17 aa, synthetic construct
  REGION 1..17: note = Synthetic Peptide
VISYDGTNKYYADSVKG

SEQ ID NO: 667 - protein, 19 aa, synthetic construct
  REGION 1..19: note = Synthetic Peptide
VYYGSGIYYKNRYYYGMDV

SEQ ID NO: 668 - protein, 11 aa, synthetic construct
  REGION 1..11: note = Synthetic Peptide
GGHNIGSKGVH

SEQ ID NO: 669 - protein, 7 aa, synthetic construct
  REGION 1..7: note = Synthetic Peptide
RNSNRPS

SEQ ID NO: 670 - protein, 9 aa, synthetic construct
  REGION 1..9: note = Synthetic Peptide
QVWDSSTVV

SEQ ID NO: 671 - protein, 5 aa, synthetic construct
  REGION 1..5: note = Synthetic Peptide
NYGMH

SEQ ID NO: 672 - protein, 17 aa, synthetic construct
  REGION 1..17: note = Synthetic Peptide
VISNDGSNKYYADSVKG

SEQ ID NO: 673 - protein, 19 aa, synthetic construct
  REGION 1..19: note = Synthetic Peptide
VYYGSGIYYKKRYYYGMDV

SEQ ID NO: 674 - protein, 11 aa, synthetic construct
  REGION 1..11: note = Synthetic Peptide
GGHNIGSQNVH

SEQ ID NO: 675 - protein, 7 aa, synthetic construct
  REGION 1..7: note = Synthetic Peptide
RDSNRPS

SEQ ID NO: 676 - protein, 9 aa, synthetic construct
  REGION 1..9: note = Synthetic Peptide
QVWDSSTVV

SEQ ID NO: 677 - protein, 5 aa, synthetic construct
  REGION 1..5: note = Synthetic Peptide
NYGMH

SEQ ID NO: 678 - protein, 17 aa, synthetic construct
  REGION 1..17: note = Synthetic Peptide
VISYDGSNKYYADSVKG

SEQ ID NO: 679 - protein, 19 aa, synthetic construct
  REGION 1..19: note = Synthetic Peptide
VYYGSGIYYKKRYYYGMDV

SEQ ID NO: 680 - protein, 11 aa, synthetic construct
  REGION 1..11: note = Synthetic Peptide
GGNNIGSKNVH

SEQ ID NO: 681 - protein, 7 aa, synthetic construct
  REGION 1..7: note = Synthetic Peptide
RNSNRPS

SEQ ID NO: 682 - protein, 9 aa, synthetic construct
  REGION 1..9: note = Synthetic Peptide
QVWDSSTVV

SEQ ID NO: 683 - protein, 5 aa, synthetic construct
  REGION 1..5: note = Synthetic Peptide
SYGMH

SEQ ID NO: 684 - protein, 17 aa, synthetic construct
  REGION 1..17: note = Synthetic Peptide
VISYDGSNKYYADSVKG

SEQ ID NO: 685 - protein, 19 aa, synthetic construct
  REGION 1..19: note = Synthetic Peptide
VYYGSGSYYKNRYYYGMDV

SEQ ID NO: 686 - protein, 11 aa, synthetic construct
  REGION 1..11: note = Synthetic Peptide
GGNNIGSKNVH

SEQ ID NO: 687 - protein, 7 aa, synthetic construct
  REGION 1..7: note = Synthetic Peptide
RDINRPS

SEQ ID NO: 688 - protein, 8 aa, synthetic construct
  REGION 1..8: note = Synthetic Peptide
QVWDSSVV

SEQ ID NO: 689 - protein, 5 aa, synthetic construct
  REGION 1..5: note = Synthetic Peptide
NYGMH

SEQ ID NO: 690 - protein, 17 aa, synthetic construct
  REGION 1..17: note = Synthetic Peptide
VISYDGSNKYYADSVKG

SEQ ID NO: 691 - protein, 19 aa, synthetic construct
  REGION 1..19: note = Synthetic Peptide
VYYGSGIYYKKRYYYGMDV

SEQ ID NO: 692 - protein, 11 aa, synthetic construct
  REGION 1..11: note = Synthetic Peptide
EGNNIGSKNVH

SEQ ID NO: 693 - protein, 7 aa, synthetic construct
  REGION 1..7: note = Synthetic Peptide
RNSNRPS

SEQ ID NO: 694 - protein, 9 aa, synthetic construct
  REGION 1..9: note = Synthetic Peptide
QAWDSSTVV

SEQ ID NO: 695 - protein, 5 aa, synthetic construct
  REGION 1..5: note = Synthetic Peptide
NNGMH

SEQ ID NO: 696 - protein, 17 aa, synthetic construct
  REGION 1..17: note = Synthetic Peptide
VISYDGSNKYYTDSVKG

SEQ ID NO: 697 - protein, 19 aa, synthetic construct
  REGION 1..19: note = Synthetic Peptide
VYYGSGIYYKKRYYYGMDV

SEQ ID NO: 698 - protein, 11 aa, synthetic construct
  REGION 1..11: note = Synthetic Peptide
GGNNIGSKNVH

SEQ ID NO: 699 - protein, 7 aa, synthetic construct
  REGION 1..7: note = Synthetic Peptide
RDSNRPS

SEQ ID NO: 700 - protein, 11 aa, synthetic construct
  REGION 1..11: note = Synthetic Peptide
QVWDSSSDHVV

SEQ ID NO: 701 - protein, 5 aa, synthetic construct
  REGION 1..5: note = Synthetic Peptide
NYGMH

SEQ ID NO: 702 - protein, 17 aa, synthetic construct
  REGION 1..17: note = Synthetic Peptide
VISYDGSNKYYADSVKG

SEQ ID NO: 703 - protein, 19 aa, synthetic construct
  REGION 1..19: note = Synthetic Peptide
VYYGSGIYYKKRYYYGMDV

SEQ ID NO: 704 - protein, 11 aa, synthetic construct
  REGION 1..11: note = Synthetic Peptide
GGNNIGSKNVH

SEQ ID NO: 705 - protein, 7 aa, synthetic construct
  REGION 1..7: note = Synthetic Peptide
RNSNRPS

SEQ ID NO: 706 - protein, 9 aa, synthetic construct
  REGION 1..9: note = Synthetic Peptide
QAWDSSNVV

SEQ ID NO: 707 - protein, 5 aa, synthetic construct
  REGION 1..5: note = Synthetic Peptide
RNGMH

SEQ ID NO: 708 - protein, 17 aa, synthetic construct
  REGION 1..17: note = Synthetic Peptide
VISNDGSNKYYADSVKG

SEQ ID NO: 709 - protein, 19 aa, synthetic construct
  REGION 1..19: note = Synthetic Peptide
VYYGSGIYYKNNYYYGMDV

SEQ ID NO: 710 - protein, 11 aa, synthetic construct
  REGION 1..11: note = Synthetic Peptide
GGNNIGSQNVH

SEQ ID NO: 711 - protein, 7 aa, synthetic construct
  REGION 1..7: note = Synthetic Peptide
RDSNRPS

SEQ ID NO: 712 - protein, 9 aa, synthetic construct
  REGION 1..9: note = Synthetic Peptide
QVWDSSTVV

SEQ ID NO: 713 - protein, 5 aa, synthetic construct
  REGION 1..5: note = Synthetic Peptide
RNGMH

SEQ ID NO: 714 - protein, 17 aa, synthetic construct
  REGION 1..17: note = Synthetic Peptide
VISNDGSNKYYADSVKG

SEQ ID NO: 715 - protein, 19 aa, synthetic construct
  REGION 1..19: note = Synthetic Peptide
VYYGSGIYYKNRYYYGMDV

SEQ ID NO: 716 - protein, 11 aa, synthetic construct
  REGION 1..11: note = Synthetic Peptide
GGNNIGSKNVH

SEQ ID NO: 717 - protein, 7 aa, synthetic construct
  REGION 1..7: note = Synthetic Peptide
RDSNRPS

SEQ ID NO: 718 - protein, 9 aa, synthetic construct
  REGION 1..9: note = Synthetic Peptide
QVWDSSTVV

SEQ ID NO: 719 - protein, 5 aa, synthetic construct
  REGION 1..5: note = Synthetic Peptide
NYGMH

SEQ ID NO: 720 - protein, 17 aa, synthetic construct
  REGION 1..17: note = Synthetic Peptide
VISYDGSNKYYADSVKG

SEQ ID NO: 721 - protein, 19 aa, synthetic construct
  REGION 1..19: note = Synthetic Peptide
VYYGSGIYYKKRYYYGMDV

SEQ ID NO: 722 - protein, 11 aa, synthetic construct
  REGION 1..11: note = Synthetic Peptide
GGNNIGSKNVH

SEQ ID NO: 723 - protein, 7 aa, synthetic construct
  REGION 1..7: note = Synthetic Peptide
RNSNRPS

SEQ ID NO: 724 - protein, 9 aa, synthetic construct
  REGION 1..9: note = Synthetic Peptide
QIWDSSTVV

SEQ ID NO: 725 - protein, 5 aa, synthetic construct
  REGION 1..5: note = Synthetic Peptide
RNGMH

SEQ ID NO: 726 - protein, 17 aa, synthetic construct
  REGION 1..17: note = Synthetic Peptide
VISNDGSNKYYADSVKG

SEQ ID NO: 727 - protein, 19 aa, synthetic construct
  REGION 1..19: note = Synthetic Peptide
VYYGSGIYYKKNYYYGMDV

SEQ ID NO: 728 - protein, 11 aa, synthetic construct
  REGION 1..11: note = Synthetic Peptide
GGNNIGSKNVH

SEQ ID NO: 729 - protein, 7 aa, synthetic construct
  REGION 1..7: note = Synthetic Peptide
RDSNRPS

SEQ ID NO: 730 - protein, 9 aa, synthetic construct
  REGION 1..9: note = Synthetic Peptide
QVWDSSTVV

SEQ ID NO: 731 - protein, 5 aa, synthetic construct
  REGION 1..5: note = Synthetic Peptide
NNGMH

SEQ ID NO: 732 - protein, 17 aa, synthetic construct
  REGION 1..17: note = Synthetic Peptide
VISYDGSNKYYTDSVKG

SEQ ID NO: 733 - protein, 19 aa, synthetic construct
  REGION 1..19: note = Synthetic Peptide
VYYGSGIYYKKRYYYGMDV

SEQ ID NO: 734 - protein, 11 aa, synthetic construct
  REGION 1..11: note = Synthetic Peptide
EGNNIGSQNVH

SEQ ID NO: 735 - protein, 7 aa, synthetic construct
  REGION 1..7: note = Synthetic Peptide
RDSNRPS

SEQ ID NO: 736 - protein, 9 aa, synthetic construct
  REGION 1..9: note = Synthetic Peptide
QVWDGSAVV

SEQ ID NO: 737 - protein, 5 aa, synthetic construct
  REGION 1..5: note = Synthetic Peptide
SYGMH

SEQ ID NO: 738 - protein, 17 aa, synthetic construct
  REGION 1..17: note = Synthetic Peptide
VISYDGSNKYYADSVKG

SEQ ID NO: 739 - protein, 19 aa, synthetic construct
  REGION 1..19: note = Synthetic Peptide
VYYGSGIYYKKRYYYGMDV

SEQ ID NO: 740 - protein, 11 aa, synthetic construct
  REGION 1..11: note = Synthetic Peptide
EGNNIGSQNVH

SEQ ID NO: 741 - protein, 7 aa, synthetic construct
  REGION 1..7: note = Synthetic Peptide
RDSNRPS

SEQ ID NO: 742 - protein, 9 aa, synthetic construct
  REGION 1..9: note = Synthetic Peptide
QVWDGSAVV

SEQ ID NO: 743 - protein, 5 aa, synthetic construct
  REGION 1..5: note = Synthetic Peptide
NYGFH

SEQ ID NO: 744 - protein, 17 aa, synthetic construct
  REGION 1..17: note = Synthetic Peptide
VISYDGSNRYYADSVKG

SEQ ID NO: 745 - protein, 19 aa, synthetic construct
  REGION 1..19: note = Synthetic Peptide
VYYGSGTYYKNRYYYGMDV

SEQ ID NO: 746 - protein, 11 aa, synthetic construct
  REGION 1..11: note = Synthetic Peptide
GGHNIGSKGVH

SEQ ID NO: 747 - protein, 7 aa, synthetic construct
  REGION 1..7: note = Synthetic Peptide
RNSNRPS

SEQ ID NO: 748 - protein, 9 aa, synthetic construct
  REGION 1..9: note = Synthetic Peptide
QAWDSGTVV

SEQ ID NO: 749 - protein, 5 aa, synthetic construct
  REGION 1..5: note = Synthetic Peptide
NYGFH

SEQ ID NO: 750 - protein, 17 aa, synthetic construct
  REGION 1..17: note = Synthetic Peptide
VISYDGSNRYYADSVKG

SEQ ID NO: 751 - protein, 19 aa, synthetic construct
  REGION 1..19: note = Synthetic Peptide
VYYGSGTYYKNRYYYGMDV

SEQ ID NO: 752 - protein, 11 aa, synthetic construct
  REGION 1..11: note = Synthetic Peptide
GANNIGSKNVH

SEQ ID NO: 753 - protein, 7 aa, synthetic construct
  REGION 1..7: note = Synthetic Peptide
RDFNRPS

SEQ ID NO: 754 - protein, 11 aa, synthetic construct
  REGION 1..11: note = Synthetic Peptide
QVWDSSTGNVV

SEQ ID NO: 755 - protein, 5 aa, synthetic construct
  REGION 1..5: note = Synthetic Peptide
NYGFH

SEQ ID NO: 756 - protein, 17 aa, synthetic construct
  REGION 1..17: note = Synthetic Peptide
VISYDGSNKYYADSVKG

SEQ ID NO: 757 - protein, 19 aa, synthetic construct
  REGION 1..19: note = Synthetic Peptide
VYYGSGSYYKNRYYYGMDV

SEQ ID NO: 758 - protein, 11 aa, synthetic construct
  REGION 1..11: note = Synthetic Peptide
GGNNIGSKNVH

SEQ ID NO: 759 - protein, 7 aa, synthetic construct
  REGION 1..7: note = Synthetic Peptide
RDSNRPS

SEQ ID NO: 760 - protein, 9 aa, synthetic construct
  REGION 1..9: note = Synthetic Peptide
QVWDSSTVV

SEQ ID NO: 761 - protein, 5 aa, synthetic construct
  REGION 1..5: note = Synthetic Peptide
NYGMH

SEQ ID NO: 762 - protein, 17 aa, synthetic construct
  REGION 1..17: note = Synthetic Peptide
VISYDGSNKYYADSVKG

SEQ ID NO: 763 - protein, 19 aa, synthetic construct
  REGION 1..19: note = Synthetic Peptide
VYYGSGIYYKKRYYYGMDV

SEQ ID NO: 764 - protein, 11 aa, synthetic construct
  REGION 1..11: note = Synthetic Peptide
GGNNIGSKNVH

SEQ ID NO: 765 - protein, 7 aa, synthetic construct
  REGION 1..7: note = Synthetic Peptide
RDSNRPS

SEQ ID NO: 766 - protein, 11 aa, synthetic construct
  REGION 1..11: note = Synthetic Peptide
QVWDSSSAHVI

SEQ ID NO: 767 - protein, 5 aa, synthetic construct
  REGION 1..5: note = Synthetic Peptide
GYGMH

SEQ ID NO: 768 - protein, 17 aa, synthetic construct
  REGION 1..17: note = Synthetic Peptide
VISYDGSNKYYADSVKG

SEQ ID NO: 769 - protein, 19 aa, synthetic construct
  REGION 1..19: note = Synthetic Peptide
VYYGSGIYYKNRYYYGMDV

SEQ ID NO: 770 - protein, 11 aa, synthetic construct
  REGION 1..11: note = Synthetic Peptide
GGNNLGSKNVH

SEQ ID NO: 771 - protein, 7 aa, synthetic construct
  REGION 1..7: note = Synthetic Peptide
RNSNRPS

SEQ ID NO: 772 - protein, 9 aa, synthetic construct
  REGION 1..9: note = Synthetic Peptide
QVWDSSTVV

SEQ ID NO: 773 - protein, 5 aa, synthetic construct
  REGION 1..5: note = Synthetic Peptide
NNGMH

SEQ ID NO: 774 - protein, 17 aa, synthetic construct
  REGION 1..17: note = Synthetic Peptide
VISYDGSNKYYADSVKG

SEQ ID NO: 775 - protein, 19 aa, synthetic construct
  REGION 1..19: note = Synthetic Peptide
VYYGSGIYYKNRYYYGMDV

SEQ ID NO: 776 - protein, 11 aa, synthetic construct
  REGION 1..11: note = Synthetic Peptide
GGNRIGSKNVH

SEQ ID NO: 777 - protein, 7 aa, synthetic construct
  REGION 1..7: note = Synthetic Peptide
RDSNRPS

SEQ ID NO: 778 - protein, 9 aa, synthetic construct
  REGION 1..9: note = Synthetic Peptide
QVWDSSTVV

SEQ ID NO: 779 - protein, 5 aa, synthetic construct
  REGION 1..5: note = Synthetic Peptide
NYGFH

SEQ ID NO: 780 - protein, 17 aa, synthetic construct
  REGION 1..17: note = Synthetic Peptide
VISYDGSNRYYADSVKG

SEQ ID NO: 781 - protein, 19 aa, synthetic construct
  REGION 1..19: note = Synthetic Peptide
VYYGSGTYYKNRYYYGMDV

SEQ ID NO: 782 - protein, 11 aa, synthetic construct
  REGION 1..11: note = Synthetic Peptide
GGHNIGSKGVH

SEQ ID NO: 783 - protein, 7 aa, synthetic construct
  REGION 1..7: note = Synthetic Peptide
RNSNRPS

SEQ ID NO: 784 - protein, 9 aa, synthetic construct
  REGION 1..9: note = Synthetic Peptide
QVWDSSTVV

SEQ ID NO: 785 - protein, 5 aa, synthetic construct
  REGION 1..5: note = Synthetic Peptide
NYGMH

SEQ ID NO: 786 - protein, 17 aa, synthetic construct
  REGION 1..17: note = Synthetic Peptide
VISYDGSNKYYADSVKG

SEQ ID NO: 787 - protein, 19 aa, synthetic construct
  REGION 1..19: note = Synthetic Peptide
VYYGSGIYYKNRYYYGMDV

SEQ ID NO: 788 - protein, 11 aa, synthetic construct
  REGION 1..11: note = Synthetic Peptide
GGHNIGSKGVH

SEQ ID NO: 789 - protein, 7 aa, synthetic construct
  REGION 1..7: note = Synthetic Peptide
RNSNRPS

SEQ ID NO: 790 - protein, 9 aa, synthetic construct
  REGION 1..9: note = Synthetic Peptide
QVWDSSTVV

SEQ ID NO: 791 - protein, 5 aa, synthetic construct
  REGION 1..5: note = Synthetic Peptide
NNGMH

SEQ ID NO: 792 - protein, 17 aa, synthetic construct
  REGION 1..17: note = Synthetic Peptide
VISNDGSNKYYADSVRG

SEQ ID NO: 793 - protein, 19 aa, synthetic construct
  REGION 1..19: note = Synthetic Peptide
VYYGSGIYYKNRYYYGMDV

SEQ ID NO: 794 - protein, 11 aa, synthetic construct
  REGION 1..11: note = Synthetic Peptide
GGNNIGSKNVH

SEQ ID NO: 795 - protein, 7 aa, synthetic construct
  REGION 1..7: note = Synthetic Peptide
RNSNRPS

SEQ ID NO: 796 - protein, 9 aa, synthetic construct
  REGION 1..9: note = Synthetic Peptide
QVWDSSTVV

SEQ ID NO: 797 - protein, 5 aa, synthetic construct
  REGION 1..5: note = Synthetic Peptide
NNGMH

SEQ ID NO: 798 - protein, 17 aa, synthetic construct
  REGION 1..17: note = Synthetic Peptide
VISNDGSNKYYADSVRG

SEQ ID NO: 799 - protein, 19 aa, synthetic construct
  REGION 1..19: note = Synthetic Peptide
VYYGSGIYYKNRYYYGMDV

SEQ ID NO: 800 - protein, 11 aa, synthetic construct
  REGION 1..11: note = Synthetic Peptide
EGNNIGSKNVH

SEQ ID NO: 801 - protein, 7 aa, synthetic construct
  REGION 1..7: note = Synthetic Peptide
RDSNRPS

SEQ ID NO: 802 - protein, 9 aa, synthetic construct
  REGION 1..9: note = Synthetic Peptide
QVWDSSAVV

SEQ ID NO: 803 - protein, 5 aa, synthetic construct
  REGION 1..5: note = Synthetic Peptide
SSGMH

SEQ ID NO: 804 - protein, 17 aa, synthetic construct
  REGION 1..17: note = Synthetic Peptide
VISNDGSNKYYADSVKG

SEQ ID NO: 805 - protein, 19 aa, synthetic construct
  REGION 1..19: note = Synthetic Peptide
VYYGSGIYYKNNYYYGMDV

SEQ ID NO: 806 - protein, 11 aa, synthetic construct
  REGION 1..11: note = Synthetic Peptide
GGNNIGSKNVH

SEQ ID NO: 807 - protein, 7 aa, synthetic construct
  REGION 1..7: note = Synthetic Peptide
RNSNRPS

SEQ ID NO: 808 - protein, 9 aa, synthetic construct
  REGION 1..9: note = Synthetic Peptide
QAWDSSTVV

SEQ ID NO: 809 - protein, 5 aa, synthetic construct
  REGION 1..5: note = Synthetic Peptide
NYGMH

SEQ ID NO: 810 - protein, 17 aa, synthetic construct
  REGION 1..17: note = Synthetic Peptide
VISYDGSNKYYADSVKG

SEQ ID NO: 811 - protein, 19 aa, synthetic construct
  REGION 1..19: note = Synthetic Peptide
VYYGSGIYYKKRYYYGMDV

SEQ ID NO: 812 - protein, 11 aa, synthetic construct
  REGION 1..11: note = Synthetic Peptide
GGNNIGSQNVH

SEQ ID NO: 813 - protein, 7 aa, synthetic construct
  REGION 1..7: note = Synthetic Peptide
RDSNRPS

SEQ ID NO: 814 - protein, 9 aa, synthetic construct
  REGION 1..9: note = Synthetic Peptide
QVWDSSAVV

SEQ ID NO: 815 - protein, 5 aa, synthetic construct
  REGION 1..5: note = Synthetic Peptide
SSGMH

SEQ ID NO: 816 - protein, 17 aa, synthetic construct
  REGION 1..17: note = Synthetic Peptide
VISNDGSNKYYADSVKG

SEQ ID NO: 817 - protein, 19 aa, synthetic construct
  REGION 1..19: note = Synthetic Peptide
VYYGSGIYYKNRYYYGMDV

SEQ ID NO: 818 - protein, 11 aa, synthetic construct
  REGION 1..11: note = Synthetic Peptide
GGNNIGSKNVH

SEQ ID NO: 819 - protein, 7 aa, synthetic construct
  REGION 1..7: note = Synthetic Peptide
RDSNRPS

SEQ ID NO: 820 - protein, 9 aa, synthetic construct
  REGION 1..9: note = Synthetic Peptide
QAWDSGTVV

SEQ ID NO: 821 - protein, 5 aa, synthetic construct
  REGION 1..5: note = Synthetic Peptide
NYGMH

SEQ ID NO: 822 - protein, 17 aa, synthetic construct
  REGION 1..17: note = Synthetic Peptide
VISYDGSNKYYADSVKG

SEQ ID NO: 823 - protein, 19 aa, synthetic construct
  REGION 1..19: note = Synthetic Peptide
VYYGSGIYYKKRYYYGMDV

SEQ ID NO: 824 - protein, 11 aa, synthetic construct
  REGION 1..11: note = Synthetic Peptide
GGNNIGGKNVH

SEQ ID NO: 825 - protein, 7 aa, synthetic construct
  REGION 1..7: note = Synthetic Peptide
RDSNRPS

SEQ ID NO: 826 - protein, 9 aa, synthetic construct
  REGION 1..9: note = Synthetic Peptide
QVWDSSTVV

SEQ ID NO: 827 - protein, 5 aa, synthetic construct
  REGION 1..5: note = Synthetic Peptide
RNGMH

SEQ ID NO: 828 - protein, 17 aa, synthetic construct
  REGION 1..17: note = Synthetic Peptide
VISNDGSNKYYADSVKG

SEQ ID NO: 829 - protein, 19 aa, synthetic construct
  REGION 1..19: note = Synthetic Peptide
VYYGSGIYYKNNYYYGMDV

SEQ ID NO: 830 - protein, 11 aa, synthetic construct
  REGION 1..11: note = Synthetic Peptide
GGNNIGSKNVH

SEQ ID NO: 831 - protein, 7 aa, synthetic construct
  REGION 1..7: note = Synthetic Peptide
RNSNRPS

SEQ ID NO: 832 - protein, 9 aa, synthetic construct
  REGION 1..9: note = Synthetic Peptide
QVWDSSTVV

SEQ ID NO: 833 - protein, 5 aa, synthetic construct
  REGION 1..5: note = Synthetic Peptide
RNGMH

SEQ ID NO: 834 - protein, 17 aa, synthetic construct
  REGION 1..17: note = Synthetic Peptide
VISNDGSNKYYADSVKG

SEQ ID NO: 835 - protein, 19 aa, synthetic construct
  REGION 1..19: note = Synthetic Peptide
VYYGSGIYYKNNYYYGMDV

SEQ ID NO: 836 - protein, 11 aa, synthetic construct
  REGION 1..11: note = Synthetic Peptide
GGNNIESKNVH

SEQ ID NO: 837 - protein, 7 aa, synthetic construct
  REGION 1..7: note = Synthetic Peptide
RDSNRPS

SEQ ID NO: 838 - protein, 9 aa, synthetic construct
  REGION 1..9: note = Synthetic Peptide
QVWDSSTVV

SEQ ID NO: 839 - protein, 5 aa, synthetic construct
  REGION 1..5: note = Synthetic Peptide
NARMG

SEQ ID NO: 840 - protein, 19 aa, synthetic construct
  REGION 1..19: note = Synthetic Peptide
RIKSKTEGGTRDYAAPVKG

SEQ ID NO: 841 - protein, 4 aa, synthetic construct
  REGION 1..4: note = Synthetic Peptide
YSGV

SEQ ID NO: 842 - protein, 17 aa, synthetic construct
  REGION 1..17: note = Synthetic Peptide
KSSQSVLYSSNNRNYLA

SEQ ID NO: 843 - protein, 7 aa, synthetic construct
  REGION 1..7: note = Synthetic Peptide
WASTRES

SEQ ID NO: 844 - protein, 9 aa, synthetic construct
  REGION 1..9: note = Synthetic Peptide
QQYYSIPIT

SEQ ID NO: 845 - protein, 5 aa, synthetic construct
  REGION 1..5: note = Synthetic Peptide
NYGFH

SEQ ID NO: 846 - protein, 17 aa, synthetic construct
  REGION 1..17: note = Synthetic Peptide
VISYDGSNRYYASSVKG

SEQ ID NO: 847 - protein, 19 aa, synthetic construct
  REGION 1..19: note = Synthetic Peptide
VYYGSGTYYKNRYYYGMDV

SEQ ID NO: 848 - protein, 11 aa, synthetic construct
  REGION 1..11: note = Synthetic Peptide
GGHNIGSKGVH

SEQ ID NO: 849 - protein, 7 aa, synthetic construct
  REGION 1..7: note = Synthetic Peptide
RAANRPS

SEQ ID NO: 850 - protein, 9 aa, synthetic construct
  REGION 1..9: note = Synthetic Peptide
QAFDAGTVV

SEQ ID NO: 851 - protein, 5 aa, synthetic construct
  REGION 1..5: note = Synthetic Peptide
NYGFH

SEQ ID NO: 852 - protein, 17 aa, synthetic construct
  REGION 1..17: note = Synthetic Peptide
VISYAGSNRYYAASVKG

SEQ ID NO: 853 - protein, 19 aa, synthetic construct
  REGION 1..19: note = Synthetic Peptide
VYYGSGTYYKNRYYYGMDV

SEQ ID NO: 854 - protein, 11 aa, synthetic construct
  REGION 1..11: note = Synthetic Peptide
GGHNIGSKGVH

SEQ ID NO: 855 - protein, 7 aa, synthetic construct
  REGION 1..7: note = Synthetic Peptide
RQSNRPS

SEQ ID NO: 856 - protein, 9 aa, synthetic construct
  REGION 1..9: note = Synthetic Peptide
QAFDAGTVV

SEQ ID NO: 857 - protein, 5 aa, synthetic construct
  REGION 1..5: note = Synthetic Peptide
NYGFH

SEQ ID NO: 858 - protein, 17 aa, synthetic construct
  REGION 1..17: note = Synthetic Peptide
VISYSGSNRYYADSVKG

SEQ ID NO: 859 - protein, 19 aa, synthetic construct
  REGION 1..19: note = Synthetic Peptide
VYYGSGTYYKNRYYYGMDV

SEQ ID NO: 860 - protein, 11 aa, synthetic construct
  REGION 1..11: note = Synthetic Peptide
GGHNIGSKGVH

SEQ ID NO: 861 - protein, 7 aa, synthetic construct
  REGION 1..7: note = Synthetic Peptide
RQSNRPS

SEQ ID NO: 862 - protein, 9 aa, synthetic construct
  REGION 1..9: note = Synthetic Peptide
QAFDAGTVV

SEQ ID NO: 863 - protein, 11 aa, synthetic construct
  REGION 1..11: note = Synthetic Peptide
GGHNIGSKGVH

SEQ ID NO: 864 - protein, 7 aa, synthetic construct
  REGION 1..7: note = Synthetic Peptide
RNSNRPS

SEQ ID NO: 865 - protein, 9 aa, synthetic construct
  REGION 1..9: note = Synthetic Peptide
QVWDISTVV

SEQ ID NO: 866 - protein, 5 aa, synthetic construct
  REGION 1..5: note = Synthetic Peptide
NCGMH

SEQ ID NO: 867 - protein, 17 aa, synthetic construct
  REGION 1..17: note = Synthetic Peptide
VISYDGGNKYHADSVKG

SEQ ID NO: 868 - protein, 19 aa, synthetic construct
  REGION 1..19: note = Synthetic Peptide
VYYGSGIYYKNRYYYGMDV

SEQ ID NO: 869 - protein, 11 aa, synthetic construct
  REGION 1..11: note = Synthetic Peptide
GGHNIGSKGVH

SEQ ID NO: 870 - protein, 7 aa, synthetic construct
  REGION 1..7: note = Synthetic Peptide
RNSNRPS

SEQ ID NO: 871 - protein, 9 aa, synthetic construct
  REGION 1..9: note = Synthetic Peptide
QVWDSSTVV

SEQ ID NO: 872 - protein, 5 aa, synthetic construct
  REGION 1..5: note = Synthetic Peptide
NCGMH

SEQ ID NO: 873 - protein, 17 aa, synthetic construct
  REGION 1..17: note = Synthetic Peptide
VISYDGGNKYYADSVKG

SEQ ID NO: 874 - protein, 19 aa, synthetic construct
  REGION 1..19: note = Synthetic Peptide
VYYGSGIYYKNRYYYGMDV

SEQ ID NO: 875 - protein, 11 aa, synthetic construct
  REGION 1..11: note = Synthetic Peptide
GGNNIGSKNVH

SEQ ID NO: 876 - protein, 7 aa, synthetic construct
  REGION 1..7: note = Synthetic Peptide
RDSNRPS

SEQ ID NO: 877 - protein, 9 aa, synthetic construct
  REGION 1..9: note = Synthetic Peptide
QVWDSNTVV

SEQ ID NO: 878 - protein, 5 aa, synthetic construct
  REGION 1..5: note = Synthetic Peptide
NNGMH

SEQ ID NO: 879 - protein, 17 aa, synthetic construct
  REGION 1..17: note = Synthetic Peptide
VISNDGSNKYYADSVRG

SEQ ID NO: 880 - protein, 19 aa, synthetic construct
  REGION 1..19: note = Synthetic Peptide
VYYGSGIYYKNNYYYGMDV

SEQ ID NO: 881 - protein, 11 aa, synthetic construct
  REGION 1..11: note = Synthetic Peptide
GGNNIGSKNVH

SEQ ID NO: 882 - protein, 7 aa, synthetic construct
  REGION 1..7: note = Synthetic Peptide
RNSNRPS

SEQ ID NO: 883 - protein, 9 aa, synthetic construct
  REGION 1..9: note = Synthetic Peptide
QVWDSSTVV

SEQ ID NO: 884 - protein, 5 aa, synthetic construct
  REGION 1..5: note = Synthetic Peptide
TYGMH

SEQ ID NO: 885 - protein, 17 aa, synthetic construct
  REGION 1..17: note = Synthetic Peptide
VISYDGSNKYYADSVKG

SEQ ID NO: 886 - protein, 19 aa, synthetic construct
  REGION 1..19: note = Synthetic Peptide
VYYGSGSYYKKNYYYGMDV

SEQ ID NO: 887 - protein, 11 aa, synthetic construct
  REGION 1..11: note = Synthetic Peptide
GGNNIGGKNVH

SEQ ID NO: 888 - protein, 7 aa, synthetic construct
  REGION 1..7: note = Synthetic Peptide
RDSNRPS

SEQ ID NO: 889 - protein, 9 aa, synthetic construct
  REGION 1..9: note = Synthetic Peptide
QVWDSSTVV

SEQ ID NO: 890 - protein, 5 aa, synthetic construct
  REGION 1..5: note = Synthetic Peptide
SYGFH

SEQ ID NO: 891 - protein, 17 aa, synthetic construct
  REGION 1..17: note = Synthetic Peptide
VISYDGSNKYYADSVKG

SEQ ID NO: 892 - protein, 19 aa, synthetic construct
  REGION 1..19: note = Synthetic Peptide
VYYGSGTYYKNRYYYGMDV

SEQ ID NO: 893 - protein, 11 aa, synthetic construct
  REGION 1..11: note = Synthetic Peptide
GGNNIGSKNVH

SEQ ID NO: 894 - protein, 7 aa, synthetic construct
  REGION 1..7: note = Synthetic Peptide
RDSNRPS

SEQ ID NO: 895 - protein, 9 aa, synthetic construct
  REGION 1..9: note = Synthetic Peptide
QVWDSSTVV

SEQ ID NO: 896 - protein, 5 aa, synthetic construct
  REGION 1..5: note = Synthetic Peptide
NNGMH

SEQ ID NO: 897 - protein, 17 aa, synthetic construct
  REGION 1..17: note = Synthetic Peptide
VISNDGSNKYYPDSVKG

SEQ ID NO: 898 - protein, 19 aa, synthetic construct
  REGION 1..19: note = Synthetic Peptide
VYYGSGNYYKNNYYYGMDV

SEQ ID NO: 899 - protein, 11 aa, synthetic construct
  REGION 1..11: note = Synthetic Peptide
EGNNIGSQNVH

SEQ ID NO: 900 - protein, 7 aa, synthetic construct
  REGION 1..7: note = Synthetic Peptide
RDSNRPS

SEQ ID NO: 901 - protein, 9 aa, synthetic construct
  REGION 1..9: note = Synthetic Peptide
QVWDGSAVV

SEQ ID NO: 902 - protein, 5 aa, synthetic construct
  REGION 1..5: note = Synthetic Peptide
SSGMH

SEQ ID NO: 903 - protein, 17 aa, synthetic construct
  REGION 1..17: note = Synthetic Peptide
VISHDGSNKYYADSVKG

SEQ ID NO: 904 - protein, 19 aa, synthetic construct
  REGION 1..19: note = Synthetic Peptide
VYYGSGIYYKNRYYYGMDV

SEQ ID NO: 905 - protein, 11 aa, synthetic construct
  REGION 1..11: note = Synthetic Peptide
GGHNIGSKGVH

SEQ ID NO: 906 - protein, 7 aa, synthetic construct
  REGION 1..7: note = Synthetic Peptide
RNSNRPS

SEQ ID NO: 907 - protein, 9 aa, synthetic construct
  REGION 1..9: note = Synthetic Peptide
QVWDSSTVV

SEQ ID NO: 908 - protein, 5 aa, synthetic construct
  REGION 1..5: note = Synthetic Peptide
DCGMH

SEQ ID NO: 909 - protein, 17 aa, synthetic construct
  REGION 1..17: note = Synthetic Peptide
VISYDGGNKYYADSVKG

SEQ ID NO: 910 - protein, 19 aa, synthetic construct
  REGION 1..19: note = Synthetic Peptide
VYYGSGIYYKNRYYYGMDV

SEQ ID NO: 911 - protein, 11 aa, synthetic construct
  REGION 1..11: note = Synthetic Peptide
GGNNIGSKNVH

SEQ ID NO: 912 - protein, 7 aa, synthetic construct
  REGION 1..7: note = Synthetic Peptide
RSSNRPS

SEQ ID NO: 913 - protein, 9 aa, synthetic construct
  REGION 1..9: note = Synthetic Peptide
QIWDSSTVV

SEQ ID NO: 914 - protein, 5 aa, synthetic construct
  REGION 1..5: note = Synthetic Peptide
SYGMH

SEQ ID NO: 915 - protein, 17 aa, synthetic construct
  REGION 1..17: note = Synthetic Peptide
VISFDGNNKYYADSVKG

SEQ ID NO: 916 - protein, 19 aa, synthetic construct
  REGION 1..19: note = Synthetic Peptide
VYYGSGSYYKNRYYYGMDV

SEQ ID NO: 917 - protein, 11 aa, synthetic construct
  REGION 1..11: note = Synthetic Peptide
GGNNIGSKNVH

SEQ ID NO: 918 - protein, 7 aa, synthetic construct
  REGION 1..7: note = Synthetic Peptide
RDSNRPS

SEQ ID NO: 919 - protein, 9 aa, synthetic construct
  REGION 1..9: note = Synthetic Peptide
QVWDSSTVV

SEQ ID NO: 920 - protein, 5 aa, synthetic construct
  REGION 1..5: note = Synthetic Peptide
SNGMH

SEQ ID NO: 921 - protein, 17 aa, synthetic construct
  REGION 1..17: note = Synthetic Peptide
VISNDGSNKYYGDSVKG

SEQ ID NO: 922 - protein, 19 aa, synthetic construct
  REGION 1..19: note = Synthetic Peptide
VYYGSGIYYRNNYYYGMDV

SEQ ID NO: 923 - protein, 11 aa, synthetic construct
  REGION 1..11: note = Synthetic Peptide
GGNNIGSKNVH

SEQ ID NO: 924 - protein, 7 aa, synthetic construct
  REGION 1..7: note = Synthetic Peptide
RNTNRPS

SEQ ID NO: 925 - protein, 9 aa, synthetic construct
  REGION 1..9: note = Synthetic Peptide
QVWDSSTVV

SEQ ID NO: 926 - protein, 5 aa, synthetic construct
  REGION 1..5: note = Synthetic Peptide
GYGMH

SEQ ID NO: 927 - protein, 17 aa, synthetic construct
  REGION 1..17: note = Synthetic Peptide
VISYDGSNKYYADSVKG

SEQ ID NO: 928 - protein, 19 aa, synthetic construct
  REGION 1..19: note = Synthetic Peptide
VYYGSGIYYKNRYYYGMDV

SEQ ID NO: 929 - protein, 11 aa, synthetic construct
  REGION 1..11: note = Synthetic Peptide
GGNNIGSKNVH

SEQ ID NO: 930 - protein, 7 aa, synthetic construct
  REGION 1..7: note = Synthetic Peptide
RNTNRPS

SEQ ID NO: 931 - protein, 9 aa, synthetic construct
  REGION 1..9: note = Synthetic Peptide
QVWDSSTVV

SEQ ID NO: 932 - protein, 5 aa, synthetic construct
  REGION 1..5: note = Synthetic Peptide
GYGMH

SEQ ID NO: 933 - protein, 17 aa, synthetic construct
  REGION 1..17: note = Synthetic Peptide
VISYDGSNKYYADSVKG

SEQ ID NO: 934 - protein, 19 aa, synthetic construct
  REGION 1..19: note = Synthetic Peptide
VYYGSGIYYKNRYYYGMDV

SEQ ID NO: 935 - protein, 11 aa, synthetic construct
  REGION 1..11: note = Synthetic Peptide
GGNNIGDKNVH

SEQ ID NO: 936 - protein, 7 aa, synthetic construct
  REGION 1..7: note = Synthetic Peptide
RNNVRPS

SEQ ID NO: 937 - protein, 9 aa, synthetic construct
  REGION 1..9: note = Synthetic Peptide
QVWDSSTVV

SEQ ID NO: 938 - protein, 5 aa, synthetic construct
  REGION 1..5: note = Synthetic Peptide
NFGMH

SEQ ID NO: 939 - protein, 17 aa, synthetic construct
  REGION 1..17: note = Synthetic Peptide
VISYDGGNKYYADSVKG

SEQ ID NO: 940 - protein, 19 aa, synthetic construct
  REGION 1..19: note = Synthetic Peptide
VYYGSGSYYKKRYYYGMDV

SEQ ID NO: 941 - protein, 11 aa, synthetic construct
  REGION 1..11: note = Synthetic Peptide
GGNNIGSKNVH

SEQ ID NO: 942 - protein, 7 aa, synthetic construct
  REGION 1..7: note = Synthetic Peptide
RDSNRPS

SEQ ID NO: 943 - protein, 9 aa, synthetic construct
  REGION 1..9: note = Synthetic Peptide
QVWDSSTVV

SEQ ID NO: 944 - protein, 5 aa, synthetic construct
  REGION 1..5: note = Synthetic Peptide
SCGMH

SEQ ID NO: 945 - protein, 17 aa, synthetic construct
  REGION 1..17: note = Synthetic Peptide
VISYDGTNKYYADSVKG

SEQ ID NO: 946 - protein, 19 aa, synthetic construct
  REGION 1..19: note = Synthetic Peptide
VYYGSGIYYKKNYYYGMDV

SEQ ID NO: 947 - protein, 5 aa, synthetic construct
  REGION 1..5: note = Synthetic Peptide
NARMG

SEQ ID NO: 948 - protein, 19 aa, synthetic construct
  REGION 1..19: note = Synthetic Peptide
RIKSKTEGGTRDYAAPVKG

SEQ ID NO: 949 - protein, 4 aa, synthetic construct
  REGION 1..4: note = Synthetic Peptide
YSGV

SEQ ID NO: 950 - protein, 17 aa, synthetic construct
  REGION 1..17: note = Synthetic Peptide
KSSQSVLYSSNNKNYLA

SEQ ID NO: 951 - protein, 7 aa, synthetic construct
  REGION 1..7: note = Synthetic Peptide
WASTRES

SEQ ID NO: 952 - protein, 9 aa, synthetic construct
  REGION 1..9: note = Synthetic Peptide
QQYYSIPIT

SEQ ID NO: 953 - protein, 128 aa, synthetic construct
  REGION 1..128: note = Synthetic Peptide
QVQLVESGGGVVQPGRSLRLSCVVSGFNFSNNGMHWVRQAPGKGLEWVAVISNDGSNKYYADSVKGRFTISRDNSKNTLYLQMNSLRTEDTAVYYCAKVYYGSGIYYKNRNYYGMDVWGQGTTVTVSS

SEQ ID NO: 954 - protein, 106 aa, synthetic construct
  REGION 1..106: note = Synthetic Peptide
SYELTQPPSVSVALGQTARITCGGNNIGSQNVHWYQQKPGQAPVLVIYRDSNRPSGIPDRFSGSKSGNTATLTISRAQAGDEADYYCQVWDSSTVVFGGGTKLTVL

SEQ ID NO: 955 - protein, 128 aa, synthetic construct
  REGION 1..128: note = Synthetic Peptide
QVQLVESGGGVVQPGRSLRLSCAASGFNFSNYGMHWVRQAPGKGLEWVAVISYDGSNKYYADSVKGRFTISRDNSKNTLYLQMNSLRAEDTAVYFCARVYYGSGIYYKKRYYYGMDVWGQGTTVTVSS

SEQ ID NO: 956 - protein, 106 aa, synthetic construct
  REGION 1..106: note = Synthetic Peptide
SYELTQPPSVSVALGQTARITCGGHNIGSKGVHWYQQKPGQAPVLVIYRNSNRPSGIPERFSGSNSGNTATLTITRAQAGDEADYYCQVWDSSTVVFGGGTKLTVL

SEQ ID NO: 957 - protein, 128 aa, synthetic construct
  REGION 1..128: note = Synthetic Peptide
QVQLVESGGGVVQPGRSLRLSCAPSGFNFSNYGMHWVRQAPGKGLEWVAVISYDGSNKYYADSVKGRFTISRDNSKNTLFLQMNSLRAEDTAVYFCARVYYGSGSYYKKRYYYGMDVWGQGTTVTVSS

SEQ ID NO: 958 - protein, 106 aa, synthetic construct
  REGION 1..106: note = Synthetic Peptide
SYELTQPPSVSVALGQTARITCGGNNIGSQNVHWYQQKPGQAPVLVIYRDSNRPSGIPERFSGSKSGNTATLTISRAQAGDEADYYCQVWDSSTVVFGGGTQLTVL

SEQ ID NO: 959 - protein, 128 aa, synthetic construct
  REGION 1..128: note = Synthetic Peptide
QVQLVESGGGVVQPGRSLRLSCAASGFTFSSSGMHWVRQAPGKGLEWVAVISYDGTNKYYADSVKGRFTISRDNSKNTLYLQMNSLRAEDTAVYYCAKVYYGSGIYYKNRYYYGMDVWGQGTTVTVSS

SEQ ID NO: 960 - protein, 106 aa, synthetic construct
  REGION 1..106: note = Synthetic Peptide
SYELTQPPSVSVALGQTARITCGGHNIGSKGVHWYQQKPGQAPVLVIYRNSNRPSGIPERFSGSNSGNTATLTISRAQAGDEADYYCQVWDSSTVVFGGGTQLTVL

SEQ ID NO: 961 - protein, 128 aa, synthetic construct
  REGION 1..128: note = Synthetic Peptide
QVQLVESGGGVVQPGRSLRLSCAVSGFNFSNYGMHWVRQVPGRGLDWVAVISNDGSNKYYADSVKGRFTISRDNSKNTLYLQMDSLRTEDTAVYYCAKVYYGSGIYYKKRYYYGMDVWGQGTTVTVSS

SEQ ID NO: 962 - protein, 106 aa, synthetic construct
  REGION 1..106: note = Synthetic Peptide
SYELTQPPSVSVALGQTARITCGGHNIGSQNVHWYQQKPGQAPVLVIYRDSNRPSGIPERFSGSKSGNTATLTISRAQAGDEADYYCQVWDSSTVVFGGGTQLTVL

SEQ ID NO: 963 - protein, 128 aa, synthetic construct; identical to SEQ ID NO: 955
  REGION 1..128: note = Synthetic Peptide

SEQ ID NO: 964 - protein, 106 aa, synthetic construct
  REGION 1..106: note = Synthetic Peptide
SYELTQPPSVSVAPGQTARITCGGNNIGSKNVHWYQQKAGQAPVQVIYRNSNRPSGIPARFSGSNSGNTATLTISRAQAGDEADYYCQVWDSSTVVFGGGTKLTVL

SEQ ID NO: 965 - protein, 128 aa, synthetic construct
  REGION 1..128: note = Synthetic Peptide
QVQLVESGGGVVQPGRSLRLSCAASGFTFSSYGMHWVRQAPGKGLEWVAVISYDGSNKYYADSVKGRFTISRDNSKNTLYLQMNSLRGEDTAVYYCARVYYGSGSYYKNRYYYGMDVWGQGTTVTVSS

SEQ ID NO: 966 - protein, 105 aa, synthetic construct
  REGION 1..105: note = Synthetic Peptide
SYELTQPPSVSVAPGQTARIPCGGNNIGSKNVHWYQQKPGQAPVLVIYRDINRPSGIPERFSGSNSGNTATLTISRAQAGDEADYYCQVWDSSVVFGGGTKLTVL

SEQ ID NO: 967 - protein, 128 aa, synthetic construct; identical to SEQ ID NO: 955
  REGION 1..128: note = Synthetic Peptide

SEQ ID NO: 968 - protein, 106 aa, synthetic construct
  REGION 1..106: note = Synthetic Peptide
SYELTQPPSVSVALGQTARLTCEGNNIGSKNVHWYQQKPGQAPVLVIYRNSNRPSGIPERFSGSNSGNTATLTISRVQAGDEADYYCQAWDSSTVVFGGGTQLTVL

SEQ ID NO: 969 - protein, 128 aa, synthetic construct
  REGION 1..128: note = Synthetic Peptide
QVQLVESGGGLVKPGGSLRLSCAVSGFNFSNNGMHWVRQAPGKGLEWVAVISYDGSNKYYTDSVKGRFTISRDNSKNTLYLQMNSLRTEDTAVYYCAKVYYGSGIYYKKRYYYGMDVWGQGTTVTVSS

SEQ ID NO: 970 - protein, 108 aa, synthetic construct
  REGION 1..108: note = Synthetic Peptide
SYELTQPLSVSEALGQTARITCGGNNIGSKNVHWYQQKPGQAPVLVIYRDSNRPSGIPERFSGSNSGNAATLTISRVEAGDEADYYCQVWDSSSDHVVFGGGTQLTVL

SEQ ID NO: 971 - protein, 128 aa, synthetic construct; identical to SEQ ID NO: 955
  REGION 1..128: note = Synthetic Peptide

SEQ ID NO: 972 - protein, 106 aa, synthetic construct
  REGION 1..106: note = Synthetic Peptide
SYELTQPPSVSVAPGQTARITCGGNNIGSKNVHWYQQKPGQAPVLVIYRNSNRPSGIPERFSGSNSGNTATLTISGTQAMDEADYYCQAWDSSNVVFGGGTQLTVL

SEQ ID NO: 973 - protein, 128 aa, synthetic construct
  REGION 1..128: note = Synthetic Peptide
QVQLVESGGGVVQPGRSLRLSCVVSGFNFSRNGMHWVRQVPGRGLDWVAVISNDGSNKYYADSVKGRFTISRDNSKNTLYLQMNSLRAEDTAVYYCAKVYYGSGIYYKNNYYYGMDVWGQGTTVTVSS

SEQ ID NO: 974 - protein, 106 aa, synthetic construct
  REGION 1..106: note = Synthetic Peptide
SYELTQPLSVSVALGQTARITCGGNNIGSQNVHWYQQKPGQAPVLVIYRDSNRPSGIPDRFSGSKSGNTATLTISRAQAGDEADYYCQVWDSSTVVFGGGTQLTVL

SEQ ID NO: 975 - protein, 128 aa, synthetic construct
  REGION 1..128: note = Synthetic Peptide
QVQLVESGGGVVQPGRSLRLSCVVSGFNFSRNGMHWVRQVPGRGLDWVAVISNDGSNKYYADSVKGRFTISRDNSKNTLYLQMNSLRAEDTAVYYCAKVYYGSGIYYKNRYYYGMDVWGQGTTVTVSS

SEQ ID NO: 976 - protein, 106 aa, synthetic construct
  REGION 1..106: note = Synthetic Peptide
SYELTQPPSVSVAPGQTARITCGGNNIGSKNVHWYQQKPGQAPVLVIYRDSNRPSGIPERFSGSKSGTTATLTISRAQAGDEAEYYCQVWDSSTVVFGGGTELTVL

SEQ ID NO: 977 - protein, 128 aa, synthetic construct; identical to SEQ ID NO: 955
  REGION 1..128: note = Synthetic Peptide

SEQ ID NO: 978 - protein, 106 aa, synthetic construct
  REGION 1..106: note = Synthetic Peptide
SYELTQPLSVSVALGQTARITCGGNNIGSKNVHWYQQKPGQAPVLAIYRNSNRPSGIPERFTGSNSGNTATLTISRAQAGDESDYYCQIWDSSTVVFGGGTKLTVL

SEQ ID NO: 979 - protein, 128 aa, synthetic construct
  REGION 1..128: note = Synthetic Peptide
QVQLVESGGGVVQPGRSLRLSCAASGFNFSRNGMHWVRQVPGRGLDWVAVISNDGSNKYYADSVKGRFTISRDNSKNTLYLQMNSLRAEDTAVYYCAKVYYGSGIYYKKNYYYGMDVWGQGTTVTVSS

SEQ ID NO: 980 - protein, 106 aa, synthetic construct
  REGION 1..106: note = Synthetic Peptide
SYELTQPPSVSVALGQTARISCGGNNIGSKNVHWYQQKPGQAPVLVIYRDSNRPSGIPERFSGSKSGTTATLTISRAQAGDEAEYYCQVWDSSTVVFGGGTQLTVL

SEQ ID NO: 981 - protein, 128 aa, synthetic construct
  REGION 1..128: note = Synthetic Peptide
QVQLVESGGGVVQPGRSLRLSCAVSGFNFSNNGMHWVRQAPGKGLEWVAVISYDGSNKYYTDSVKGRFTISRDNSKNTLYLQMNSLRTEDTAVYYCAKVYYGSGIYYKKRYYYGMDVWGQGTTVTVSS

SEQ ID NO: 982 - protein, 106 aa, synthetic construct
  REGION 1..106: note = Synthetic Peptide
SYELTQPPSVSVALGQTARITCEGNNIGSQNVHWYQQKPGQAPVLVMYRDSNRPSGIPERFSGSKSGNTATLAISRAQAGDESDYYCQVWDGSAVVFGGGTKLTVL

SEQ ID NO: 983 - protein, 128 aa, synthetic construct
  REGION 1..128: note = Synthetic Peptide
QVQLVESGGGVVQPGRSLRLSCAASGFTFSSYGMHWVRQAPGKGLEWVAVISYDGSNKYYADSVKGRFTISRDNSKNTLYLQMNSLRAEDTAVYFCARVYYGSGIYYKKRYYYGMDVWGQGTTVTVSS

SEQ ID NO: 984 - protein, 106 aa, synthetic construct
  REGION 1..106: note = Synthetic Peptide
SYELTQPLSVSVALGQTARITCEGNNIGSQNVHWYQQKPGQAPVLVMYRDSNRPSGIPERFSGSKSGNTATLAISRAQAGDESDYYCQVWDGSAVVFGGGTQLTVL

SEQ ID NO: 985 - protein, 128 aa, synthetic construct
  REGION 1..128: note = Synthetic Peptide
QVQLVESGGGVVQPGRSLRLSCAASGFTFSNYGFHWVRQTPGKGLEWVAVISYDGSNRYYADSVKGRFTISRDNSKNTLYLQMNSLRGEDTALYYCARVYYGSGTYYKNRYYYGMDVWGQGTTVTVSS

SEQ ID NO: 986 - protein, 106 aa, synthetic construct
  REGION 1..106: note = Synthetic Peptide
SYELTQPPSVSVALGQTARITCGGHNIGSKGVHWYQQKPGQAPVLVIYRNSNRPSGIPERFSGSNSGNTATLTISGTQAMDEADYYCQAWDSGTVVFGGGTQLTVL

SEQ ID NO: 987 - protein, 128 aa, synthetic construct; identical to SEQ ID NO: 985
  REGION 1..128: note = Synthetic Peptide

SEQ ID NO: 988 - protein, 108 aa, synthetic construct
  REGION 1..108: note = Synthetic Peptide
SYELTQPPSVSVALGQTARITCGANNIGSKNVHWYQQKPGQPPVLVIYRDFNRPSGIPERFSASNSGNTATLTISRGQAGDEADYYCQVWDSSTGNVVFGGGTKLTVL

SEQ ID NO: 989 - protein, 128 aa, synthetic construct
  REGION 1..128: note = Synthetic Peptide
QVQLVESGGGVVQPGRSLRLSCAASGFIFSNYGFHWVRQTPGKGLEWVAVISYDGSNKYYADSVKGRFTISRDNSKNTLYLQMNSLRGEDTAVYYCARVYYGSGSYYKNRYYYGMDVWGQGTTVTVSS

SEQ ID NO: 990 - protein, 106 aa, synthetic construct
  REGION 1..106: note = Synthetic Peptide
SYELTQPPSVSVAPGQTARITCGGNNIGSKNVHWYQQKPGQAPVLVIYRDSNRPSGIPERFSGSKSGTTATLTISRAQAGDEADYYCQVWDSSTVVFGGGTELTVL

SEQ ID NO: 991 - protein, 128 aa, synthetic construct; identical to SEQ ID NO: 955
  REGION 1..128: note = Synthetic Peptide

SEQ ID NO: 992 - protein, 108 aa, synthetic construct
  REGION 1..108: note = Synthetic Peptide
SYELTQSSSVSVAPGQTARITCGGNNIGSKNVHWYQQKPGQAPVLVIYRDSNRPSGIPERFSGSKSGTTATLTISRVEAGDEADYYCQVWDSSSAHVIFGGGTKLTVL

SEQ ID NO: 993 - protein, 128 aa, synthetic construct
  REGION 1..128: note = Synthetic Peptide
QVQLVESGGGVVQPGRSLRLSCGASGFTFSGYGMHWVRQAPGKGLEWVAVISYDGSNKYYADSVKGRFTISRDNSKNTLYLQMNSLRGEDTAVYYCARVYYGSGIYYKNRYYYGMDVWGQGTTVTVSS

SEQ ID NO: 994 - protein, 106 aa, synthetic construct
  REGION 1..106: note = Synthetic Peptide
SYELTQPPSGSVALGQTARITCGGNNLGSKNVHWYQQKPGQAPVLVIYRNSNRPSGIPERFSGSNSGNTATLTISRAQAGDEADYYCQVWDSSTVVFGGGTKLTVL

SEQ ID NO: 995 - protein, 128 aa, synthetic construct
  REGION 1..128: note = Synthetic Peptide
QVQLVESGGGLVKPGGSLRLSCAASGFTFSNNGMHWVRQAPGKGLEWVAVISYDGSNKYYADSVKGRFTISRDNSKNTLYLQMNSLRAEDTAVYYCAKVYYGSGIYYKNRYYYGMDVWGQGTTVTVSS

SEQ ID NO: 996 - protein, 106 aa, synthetic construct
  REGION 1..106: note = Synthetic Peptide
SYELTQPPSVSVALGQTARITCGGNRIGSKNVHWYQQKPGQAPVLVIYRDSNRPSGIPERFSGSKSGTTATLTISRAQAGDEAEYYCQVWDSSTVVFGGGTKLTVL

SEQ ID NO: 997 - protein, 128 aa, synthetic construct; identical to SEQ ID NO: 985
  REGION 1..128: note = Synthetic Peptide

SEQ ID NO: 998 - protein, 106 aa, synthetic construct
  REGION 1..106: note = Synthetic Peptide
SYELTQLPSVSVALGQTARITCGGHNIGSKGVHWYQQKPGQAPVLVIYRNSNRPSGIPERFSGSNSGNTATLTISRAQAGDEADYYCQVWDSSTVVFGGGTELTVL

SEQ ID NO: 999 - protein, 128 aa, synthetic construct
  REGION 1..128: note = Synthetic Peptide
QVQLVESGGGVVQPGRSLRLSCAASGFNFSNYGMHWVRQAPGKGLEWVAVISYDGSNKYYADSVKGRFTISRDNSKNTLYLQMNSLRAEDTAVYFCARVYYGSGIYYKNRYYYGMDVWGQGTTVTVSS

SEQ ID NO: 1000 - protein, 106 aa, synthetic construct; identical to SEQ ID NO: 960
  REGION 1..106: note = Synthetic Peptide

SEQ ID NO: 1001 - protein, 128 aa, synthetic construct
  REGION 1..128: note = Synthetic Peptide
QVQLVESGGDLVQPGRSLRLSCAASGFTFSNNGMHWVRQAPGKGLEWVAVISNDGSNKYYADSVRGRFTISRDNSKNTLYLQMNSLRAEDTAVYYCAKVYYGSGIYYKNRYYYGMDVWGQGTTVTVSS

SEQ ID NO: 1002 - protein, 106 aa, synthetic construct
  REGION 1..106: note = Synthetic Peptide
SYELTQPLSVSVALGQTARITCGGNNIGSKNVHWYQQKPGQAPVLVIYRNSNRPSGIPERFSGSNSGNTATLTLSRVQAGDEADYYCQVWDSSTVVFGGGTKLTVL

SEQ ID NO: 1003 - protein, 128 aa, synthetic construct
  REGION 1..128: note = Synthetic Peptide
QVQLVESGGGVVQPGRSLRLSCAVSGFNFSNNGMHWVRQAPGKGLEWVAVISNDGSNKYYADSVRGRFTISRDNSKNTLYLQMDSLRTEDTAVYYCAKVYYGSGIYYKNRYYYGMDVWGQGTTVTVSS

SEQ ID NO: 1004 - protein, 106 aa, synthetic construct
  REGION 1..106: note = Synthetic Peptide
SYELTQPPSVSVALGQTARLTCEGNNIGSKNVHWYQQKPGQAPVLVIYRDSNRPSGIPERFSGSKSGNTATLAISRAQAGDESDYYCQVWDSSAVVFGGGTKLTVL

SEQ ID NO: 1005 - protein, 128 aa, synthetic construct
  REGION 1..128: note = Synthetic Peptide
QVQLVESGGGVVQPGRSLRLSCAASGFTFSSSGMHWVRQAPGKGLEWVAVISNDGSNKYYADSVKGRFTISRDNSKNTLYLQMNSLRAEDTAVYYCAKVYYGSGIYYKNNYYYGMDVWGQGTTVTVSS

SEQ ID NO: 1006 - protein, 106 aa, synthetic construct
  REGION 1..106: note = Synthetic Peptide
SYELTQPPSVSVALGQTARITCGGNNIGSKNVHWYQQKPGQAPVLAIYRNSNRPSGIPERFTGSNSGNTATLTISGTQAMDEADYYCQAWDSSTVVFGGGTKLTVL

SEQ ID NO: 1007 - protein, 128 aa, synthetic construct; identical to SEQ ID NO: 955
  REGION 1..128: note = Synthetic Peptide

SEQ ID NO: 1008 - protein, 106 aa, synthetic construct
  REGION 1..106: note = Synthetic Peptide
SYELTQPPSVSVALGQTARITCGGNNIGSQNVHWYQQKPGQAPVLVIYRDSNRPSGIPERFSGSKSGNTATLAISRAQAGDESDYYCQVWDSSAVVFGGGTQLTVL

SEQ ID NO: 1009 - protein, 128 aa, synthetic construct
  REGION 1..128: note = Synthetic Peptide
QVQLVESGGGVVQPGRSLRLSCAASGFTLSSSGMHWVRQAPGKGLEWVAVISNDGSNKYYADSVKGRFTISRDDSKNTLYLQMDSLRTEDTAVYYCAKVYYGSGIYYKNRYYYGMDVWGQGTTVTVSS

SEQ ID NO: 1010 - protein, 106 aa, synthetic construct
  REGION 1..106: note = Synthetic Peptide
SYELTQPPSVSVALGQTARISCGGNNIGSKNVHWYQQKPGQAPVLVMYRDSNRPSGIPERFSGSNSGNTATLTISGTQAMDEADYYCQAWDSGTVVFGGGTKLTVL

SEQ ID NO: 1011 - protein, 128 aa, synthetic construct; identical to SEQ ID NO: 955
  REGION 1..128: note = Synthetic Peptide

SEQ ID NO: 1012 - protein, 106 aa, synthetic construct
  REGION 1..106: note = Synthetic Peptide
SYELTQPPSVSVALGQTARITCGGNNIGGKNVHWYQQKPGQAPVLVIYRDSNRPSGIPERFSGSKSGNTATLTISRAQAGDESDYYCQVWDSSTVVFGGGTQLTVL

SEQ ID NO: 1013 - protein, 128 aa, synthetic construct; identical to SEQ ID NO: 973
  REGION 1..128: note = Synthetic Peptide

SEQ ID NO: 1014 - protein, 106 aa, synthetic construct
  REGION 1..106: note = Synthetic Peptide
SYELTQPLSVSVALGQTARITCGGNNIGSKNVHWYQQKPGQAPVLVIYRNSNRPSGIPERFSGSNSGNTATLTISRAQAGDEADYYCQVWDSSTVVFGGGTKLTVL

SEQ ID NO: 1015 - protein, 128 aa, synthetic construct
  REGION 1..128: note = Synthetic Peptide
QVQLVESGGGLVKPGGSLRLSCAASGFNFSRNGMHWVRQVPGRGLDWVAVISNDGSNKYYADSVKGRFTISRDNSKNTLYLQMNSLRAEDTAVYYCAKVYYGSGIYYKNNYYYGMDVWGQGTTVTVSS

SEQ ID NO: 1016 - protein, 106 aa, synthetic construct
  REGION 1..106: note = Synthetic Peptide
SYELTQPPSVSVALGQTARISCGGNNIESKNVHWYQQKPGQAPVLVIYRDSNRPSGIPERFSGSKSGTTATLTISRAQAGDEAEYYCQVWDSSTVVFGGGTQLTVL

SEQ ID NO: 1017 - protein, 115 aa, synthetic construct; identical to SEQ ID NO: 13
  REGION 1..115: note = Synthetic Peptide

SEQ ID NO: 1018 - protein, 114 aa, synthetic construct
  REGION 1..114: note = Synthetic Peptide
DIVMTQSPDSLAVSLGERATINCKSSQSVLYSSNNRNYLAWYHQKPGQSPKLLISWASTRESGVPDRFSGSGSGTDFTLTINSLQAEDVAVYYCQQYYSIPITFGGGTKVEIKR

SEQ ID NO: 1019 - protein, 128 aa, synthetic construct
  REGION 1..128: note = Synthetic Peptide
QVQLVESGGGVVQPGRSLRLSCAASGFTFSNYGFHWVRQTPGKGLEWVAVISYDGSNRYYASSVKGRFTISRDNSKNTLYLQMNSLRGEDTALYYCARVYYGSGTYYKNRYYYGMDVWGQGTTVTVSS

SEQ ID NO: 1020 - protein, 107 aa, synthetic construct
  REGION 1..107: note = Synthetic Peptide
SYELTQPPSVSVALGQTARITCGGHNIGSKGVHWYQQKPGQAPVLVIYRAANRPSGIPERFSGSNSGNTATLTISGTQAGDEADYYCQAFDAGTVVFGGGTQLTVLG

SEQ ID NO: 1021 - protein, 128 aa, synthetic construct
  REGION 1..128: note = Synthetic Peptide
QVQLVESGGGVVQPGRSLRLSCAASGFTFSNYGFHWVRQTPGKGLEWVAVISYAGSNRYYAASVKGRFTISRDNSKNTLYLQMNSLRGEDTALYYCARVYYGSGTYYKNRYYYGMDVWGQGTTVTVSS

SEQ ID NO: 1022 - protein, 107 aa, synthetic construct
  REGION 1..107: note = Synthetic Peptide
SYELTQPPSVSVALGQTARITCGGHNIGSKGVHWYQQKPGQAPVLVIYRQSNRPSGIPERFSGSNSGNTATLTISGTQAEDEADYYCQAFDAGTVVFGGGTQLTVLG

SEQ ID NO: 1023 - protein, 128 aa, synthetic construct
  REGION 1..128: note = Synthetic Peptide
QVQLVESGGGVVQPGRSLRLSCAASGFTFSNYGFHWVRQTPGKGLEWVAVISYSGSNRYYADSVKGRFTISRDNSKNTLYLQMNSLRGEDTALYYCARVYYGSGTYYKNRYYYGMDVWGQGTTVTVSS

SEQ ID NO: 1024 - protein, 107 aa, synthetic construct
  REGION 1..107: note = Synthetic Peptide
SYELTQPPSVSVALGQTARITCGGHNIGSKGVHWYQQKPGQAPVLVIYRQSNRPSGIPERFSGSNSGNTATLTISGTQAGDEADYYCQAFDAGTVVFGGGTQLTVLG

SEQ ID NO: 1025 - protein, 107 aa, synthetic construct
  REGION 1..107: note = Synthetic Peptide
SYELTQPLSVSVALGQTARITCGGHNIGSKGVHWYQQKPGQAPVLVIYRNSNRPSGIPERFSGSNSGNTATLTISRAQAGDEADYYCQVWDISTVVFGGGTELTVLG

SEQ ID NO: 1026 - protein, 128 aa, synthetic construct
  REGION 1..128: note = Synthetic Peptide
QVQLVESGGGVAQPGRSLRLSCAASGFNFSNCGMHWVRQAPGKGLEWVAVISYDGGNKYHADSVKGRFTISRDDSKNTLYLQMDSLRTEDTAVYYCAKVYYGSGIYYKNRYYYGMDVWGQGTTVTVSS

SEQ ID NO: 1027 - protein, 107 aa, synthetic construct
  REGION 1..107: note = Synthetic Peptide
SYELTQPLSVSVALGQTARITCGGHNIGSKGVHWYQQKPGQAPVLVIYRNSNRPSGIPERFSGSNSGKTATLTISRAQAGDEADYYCQVWDSSTVVFGGGTELTVLG

SEQ ID NO: 1028 - protein, 128 aa, synthetic construct
  REGION 1..128: note = Synthetic Peptide
QVQLVESGGGVAQPGRSLRLSCAASGFNFSNCGMHWVRQAPGKGLEWVAVISYDGGNKYYADSVKGRFTISRDDSKNTLYLQMDSLRTEDTAVYYCAKVYYGSGIYYKNRYYYGMDVWGQGTTVTVSS

SEQ ID NO: 1029 - protein, 107 aa, synthetic construct
  REGION 1..107: note = Synthetic Peptide
SYELTQPLSVSVALGQTARITCGGNNIGSKNVHWYQKRPGQAPVLVIYRDSNRPSGIPERFSGSKSGNTATLTISRAQAGDEADYYCQVWDSNTVVFGGGTNLTVLG

SEQ ID NO: 1030 - protein, 128 aa, synthetic construct
  REGION 1..128: note = Synthetic Peptide
QVQLVESGGGVVQPGRSLRLSCVVSGFNFSNNGMHWVRQAPGKGLEWVAVISNDGSNKYYADSVRGRFTISRDNSKNTLYLQMNSLRAEDTAVYSCAKVYYGSGIYYKNNYYYGMDVWGQGTTVTVSS

SEQ ID NO: 1031 - protein, 107 aa, synthetic construct
  REGION 1..107: note = Synthetic Peptide
SYELTQPLSVSVALGQTARITCGGNNIGSKNVHWYQQKAGQAPVQVIYRNSNRPSGIPERFSGSNSGNTATLTISRAQAGDEADYYCQVWDSSTVVFGGGTKLTVLG

SEQ ID NO: 1032 - protein, 128 aa, synthetic construct
  REGION 1..128: note = Synthetic Peptide
QVQLVESGGGVVQPGRSLRLSCAASGFNFNTYGMHWVRQAPGKGLEWVAVISYDGSNKYYADSVKGRFTISRDNSKSTLYLQMNSLRAEDTAVYYCARVYYGSGSYYKKNYYYGMDVWGQGTTVTVSS

SEQ ID NO: 1033 - protein, 107 aa, synthetic construct
  REGION 1..107: note = Synthetic Peptide
SYELTQPLSVSVALGQTARITCGGNNIGGKNVHWYQQKPGQAPVLVIYRDSNRPSGIPERFSGSKSGNTATLTISRAQAGDESDYYCQVWDSSTVVFGGGTTLTVLG

SEQ ID NO: 1034 - protein, 128 aa, synthetic construct
  REGION 1..128: note = Synthetic Peptide
QVQVVESGGGVVQPGRSLRLSCAASGFTLSSYGFHWVRQTPGKGLEWVAVISYDGSNKYYADSVKGRFTISRDNSKNTLYLQMNSLRGEDTAVYYCARVYYGSGTYYKNRYYYGMDVWGQGTTVTVSS

SEQ ID NO: 1035 - protein, 107 aa, synthetic construct
  REGION 1..107: note = Synthetic Peptide
SYELTQPLSVSEALGQTARITCGGNNIGSKNVHWYQQKPGQAPVLVIYRDSNRPSGIPERFSGSKSGNTATLTISRAQAGDEADYYCQVWDSSTVVFGGGTKVTVLG

SEQ ID NO: 1036 - protein, 128 aa, synthetic construct
  REGION 1..128: note = Synthetic Peptide
QVQLVESGGGVVQPGRSLRLSCVVSGFNFINNGMHWVRQAPGKGLDWVAVISNDGSNKYYPDSVKGRFTISRDNSKNTLYLQMNSLRAEDSAVYYCAKVYYGSGNYYKNNYYYGMDVWGQGTTVTVSS

SEQ ID NO: 1037 - protein, 107 aa, synthetic construct
  REGION 1..107: note = Synthetic Peptide
SYELTQPLSVSVALGQTARITCEGNNIGSQNVHWYQQKPGQAPVLVMYRDSNRPSGIPERFSGSKSGNTATLAISRAQAGDESDYYCQVWDGSAVVFGGGTTLTVLG

SEQ ID NO: 1038 - protein, 128 aa, synthetic construct
  REGION 1..128: note = Synthetic Peptide
QMQVVESGGGVVQPGRSLRLSCAASGFTFSSSGMHWVRQAPGKGLEWVAVISHDGSNKYYADSVKGRFTISRDNSKNTLYLQMNSLGGEDTAVYYCAKVYYGSGIYYKNRYYYGMDVWGQGTTVIVSS

SEQ ID NO: 1039 - protein, 107 aa, synthetic construct
  REGION 1..107: note = Synthetic Peptide
SYELTQPLSVSVALGQTARITCGGHNIGSKGVHWYQQKPGQAPVLVIYRNSNRPSGIPERFSGSNSGNTATLTISRAQAGDEADYYCQVWDSSTVVFGGGTELTVLG

SEQ ID NO: 1040 - protein, 128 aa, synthetic construct
  REGION 1..128: note = Synthetic Peptide
QVQLVESGGGVAQPGRSLRLSCAASGFNFSDCGMHWVRQAPGKGLEWVAVISYDGGNKYYADSVKGRFTISRDDSKNTLYLQTDSLRTEDTAVYYCAKVYYGSGIYYKNRYYYGMDVWGQGTTVTVSS

SEQ ID NO: 1041 - protein, 107 aa, synthetic construct
  REGION 1..107: note = Synthetic Peptide
SYELTQPLSVSVALGQTGRITCGGNNIGSKNVHWYQQKPGQAPVLVIYRSSNRPSGIPERFSGSNSGNTATLTISRAQAGDESDYYCQIWDSSTVVFGGGTKLTVLG

SEQ ID NO: 1042 - protein, 128 aa, synthetic construct
  REGION 1..128: note = Synthetic Peptide
QVQVVESGGGVVQPGRSLRLSCAASGFTFSSYGMHWVRQAPGKGLEWVAVISFDGNNKYYADSVKGRFTISRDNSKNTLYLQMNSLRGEDTAVYYCARVYYGSGSYYKNRYYYGMDVWGQGTTVTVST

SEQ ID NO: 1043 - protein, 107 aa, synthetic construct
  REGION 1..107: note = Synthetic Peptide
SYELTQPLSVSVALGQTARITCGGNNIGSKNVHWYQQRPGQAPVLVIYRDSNRPSGIPERLSGSKAGNTATLTISRAHAGDEADYYCQVWDSSTVVFGGGTELTVQG

SEQ ID NO: 1044 - protein, 128 aa, synthetic construct
  REGION 1..128: note = Synthetic Peptide
QVQLVESGGGVVQPGRSLRLSCAVSGFTFSSNGMHWVRQAPGKGLEWVAVISNDGSNKYYGDSVKGRFTISRDNSKNTLYLQMNSLRAEDTAVYYCAKVYYGSGIYYRNNYYYGMDVWGQGTTVTVSS

SEQ ID NO: 1045 - protein, 107 aa, synthetic construct
  REGION 1..107: note = Synthetic Peptide
SYELTQPLSVSVALGQTARITCGGNNIGSKNVHWYQQKPGQAPILVIYRNTNRPSGIPERFSGSNSGNTATLTISRAQVGDESDYFCQVWDSSTVVFGGGTKLTVLG

SEQ ID NO: 1046 - protein, 128 aa, synthetic construct
  REGION 1..128: note = Synthetic Peptide
QVQVVESGGGVVQPGRSLRLSCGASGFTFSGYGMHWVRQAPGKGLEWVAVISYDGSNKYYADSVKGRFPISRDNSKNTLYLQMNSLRGEDTAVYYCARVYYGSGIYYKNRYYYGMDVWGQGTTVAVSS

SEQ ID NO: 1047 - protein, 107 aa, synthetic construct; identical to SEQ ID NO: 1045
  REGION 1..107: note = Synthetic Peptide

SEQ ID NO: 1048 - protein, 128 aa, synthetic construct
  REGION 1..128: note = Synthetic Peptide
QVQVVESGGGVVQPGRSLRLSCGASGFTFSGYGMHWVRQAPGKGLEWVAVISYDGSNKYYADSVKGRFTISRDNSKNTLYLQMNSLRGEDTAVYYCARVYYGSGIYYKNRYYYGMDVWGQGTTVAVSS

SEQ ID NO: 1049 - protein, 107 aa, synthetic construct
  REGION 1..107: note = Synthetic Peptide
SYDLTQPLSVSVALGQTARITCGGNNIGDKNVHWYQQKPGQAPVLVIYRNNVRPSGIPERFSGSNSGNTATLTISRAQAGDEADYYCQVWDSSTVVFGGGTKLTVLG

SEQ ID NO: 1050 - protein, 128 aa, synthetic construct
  REGION 1..128: note = Synthetic Peptide
QVQLVESGGGVVQPGRSLRLSCAASGLNFSNFGMHWVRQAPGKGLDWVAVISYDGGNKYYADSVKGRFTVSRDNSKNTLFLQMNSLRAEDTALYYCAKVYYGSGSYYKKRYYYGMDVWGQGTTVTVSS

SEQ ID NO: 1051 - protein, 107 aa, synthetic construct
  REGION 1..107: note = Synthetic Peptide
SYELTQPLSVSVALGQTARITCGGNNIGSKNVHWYQQKPGQAPVLVIYRDSNRPSGIPERFSGSKSGNTATLTISRAQAGDEADYYCQVWDSSTVVFGGGAKLTVLG

SEQ ID NO: 1052 - protein, 128 aa, synthetic construct
  REGION 1..128: note = Synthetic Peptide
QVQLVESGGGVVQPGRSLRLSCAASGFNFSSCGMHWVRQAPGKGLEWVAVISYDGTNKYYADSVKGRFTISRDNSKNTLYLQMNSLRAEDTAVYYCAKVYYGSGIYYKKNYYYGMDVWGQGTTVTVSS

SEQ ID NO: 1053 - protein, 115 aa, synthetic construct; identical to SEQ ID NO: 13
  REGION 1..115: note = Synthetic Peptide

SEQ ID NO: 1054 - protein, 114 aa, synthetic construct; identical to SEQ ID NO: 14
  REGION 1..114: note = Synthetic Peptide

SEQ ID NO: 1055 - protein, 330 aa, synthetic construct
  REGION 1..330: note = Synthetic Peptide
ASTKGPSVFPLAPSSKSTSGGTAALGCLVKDYFPEPVTVSWNSGALTSGVHTFPAVLQSSGLYSLSSVVTVPSSSLGTQTYICNVNHKPSNTKVDKKVEPKSCDKTHTCPPCPAPELLGGPSVFLFPPKPKDTLMISRTPEVTCVVVDVSHEDPEVKFNWYVDGVEVHNAKTKPREEQYNSTYRVVSVLTVLHQDWLNGKEYKCKVSNKALPAPIEKTISKAKGQPREPQVYTLPPSREEMTKNQVSLTCLVKGFYPSDIAVEWESNGQPENNYKTTPPVLDSDGSFFLYSKLTVDKSRWQQGNVFSCSVMHEALHNHYTQKSLSLSPGK

SEQ ID NO: 1056 - protein, 106 aa, synthetic construct
  REGION 1..106: note = Synthetic Peptide
TVAAPSVFIFPPSDEQLKSGTASVVCLLNNFYPREAKVQWKVDNALQSGNSQESVTEQDSKDSTYSLSSTLTLSKADYEKHKVYACEVTHQGLSSPVTKSFNRGEC

SEQ ID NO: 1057 - protein, 330 aa, synthetic construct; identical to SEQ ID NO: 1055
  REGION 1..330: note = Synthetic Peptide

SEQ ID NO: 1058 - protein, 105 aa, synthetic construct
  REGION 1..105: note = Synthetic Peptide
QPKAAPSVTLFPPSSEELQANKATLVCLISDFYPGAVTVAWKADSSPVKAGVETTTPSKQSNNKYAASSYLSLTPEQWKSHRSYSCQVTHEGSTVEKTVAPTECS

SEQ ID NO: 1059 - protein, 330 aa, synthetic construct; identical to SEQ ID NO: 1055
  REGION 1..330: note = Synthetic Peptide

SEQ ID NO: 1060 - protein, 105 aa, synthetic construct; identical to SEQ ID NO: 1058
  REGION 1..105: note = Synthetic Peptide

SEQ ID NO: 1061 - protein, 330 aa, synthetic construct; identical to SEQ ID NO: 1055
  REGION 1..330: note = Synthetic Peptide

SEQ ID NO: 1062 - protein, 105 aa, synthetic construct; identical to SEQ ID NO: 1058
  REGION 1..105: note = Synthetic Peptide

SEQ ID NO: 1063 - protein, 105 aa, synthetic construct; identical to SEQ ID NO: 1058
  REGION 1..105: note = Synthetic Peptide

SEQ ID NO: 1064 - protein, 330 aa, synthetic construct; identical to SEQ ID NO: 1055
  REGION 1..330: note = Synthetic Peptide

SEQ ID NO: 1065 - protein, 105 aa, synthetic construct; identical to SEQ ID NO: 1058
  REGION 1..105: note = Synthetic Peptide

SEQ ID NO: 1066 - protein, 330 aa, synthetic construct; identical to SEQ ID NO: 1055
  REGION 1..330: note = Synthetic Peptide

SEQ ID NO: 1067 - protein, 105 aa, synthetic construct; identical to SEQ ID NO: 1058
  REGION 1..105: note = Synthetic Peptide

SEQ ID NO: 1068 - protein, 330 aa, synthetic construct; identical to SEQ ID NO: 1055
  REGION 1..330: note = Synthetic Peptide

SEQ ID NO: 1069 - protein, 105 aa, synthetic construct; identical to SEQ ID NO: 1058
  REGION 1..105: note = Synthetic Peptide

SEQ ID NO: 1070 - protein, 330 aa, synthetic construct; identical to SEQ ID NO: 1055
  REGION 1..330: note = Synthetic Peptide

SEQ ID NO: 1071 - protein, 105 aa, synthetic construct; identical to SEQ ID NO: 1058
  REGION 1..105: note = Synthetic Peptide

SEQ ID NO: 1072 - protein, 330 aa, synthetic construct; identical to SEQ ID NO: 1055
  REGION 1..330: note = Synthetic Peptide

SEQ ID NO: 1073 - protein, 105 aa, synthetic construct; identical to SEQ ID NO: 1058
  REGION 1..105: note = Synthetic Peptide

SEQ ID NO: 1074 - protein, 330 aa, synthetic construct; identical to SEQ ID NO: 1055
  REGION 1..330: note = Synthetic Peptide

SEQ ID NO: 1075 - protein, 105 aa, synthetic construct; identical to SEQ ID NO: 1058
  REGION 1..105: note = Synthetic Peptide

SEQ ID NO: 1076 - protein, 330 aa, synthetic construct; identical to SEQ ID NO: 1055
  REGION 1..330: note = Synthetic Peptide

SEQ ID NO: 1077 - protein, 105 aa, synthetic construct; identical to SEQ ID NO: 1058
  REGION 1..105: note = Synthetic Peptide

SEQ ID NO: 1078 - protein, 330 aa, synthetic construct; identical to SEQ ID NO: 1055
  REGION 1..330: note = Synthetic Peptide

SEQ ID NO: 1079 - protein, 105 aa, synthetic construct; identical to SEQ ID NO: 1058
  REGION 1..105: note = Synthetic Peptide

SEQ ID NO: 1080 - protein, 330 aa, synthetic construct; identical to SEQ ID NO: 1055
  REGION 1..330: note = Synthetic Peptide

SEQ ID NO: 1081 - protein, 105 aa, synthetic construct; identical to SEQ ID NO: 1058
  REGION 1..105: note = Synthetic Peptide

SEQ ID NO: 1082 - protein, 330 aa, synthetic construct; identical to SEQ ID NO: 1055
  REGION 1..330: note = Synthetic Peptide

SEQ ID NO: 1083 - protein, 105 aa, synthetic construct; identical to SEQ ID NO: 1058
  REGION 1..105: note = Synthetic Peptide

SEQ ID NO: 1084 - protein, 330 aa, synthetic construct; identical to SEQ ID NO: 1055
  REGION 1..330: note = Synthetic Peptide

SEQ ID NO: 1085 - protein, 105 aa, synthetic construct; identical to SEQ ID NO: 1058
  REGION 1..105: note = Synthetic Peptide

SEQ ID NO: 1086 - protein, 330 aa, synthetic construct; identical to SEQ ID NO: 1055
  REGION 1..330: note = Synthetic Peptide

SEQ ID NO: 1087 - protein, 105 aa, synthetic construct; identical to SEQ ID NO: 1058
  REGION 1..105: note = Synthetic Peptide

SEQ ID NO: 1088 - protein, 330 aa, synthetic construct; identical to SEQ ID NO: 1055
  REGION 1..330: note = Synthetic Peptide

SEQ ID NO: 1089 - protein, 105 aa, synthetic construct; identical to SEQ ID NO: 1058
  REGION 1..105: note = Synthetic Peptide

SEQ ID NO: 1090 - protein, 330 aa, synthetic construct; identical to SEQ ID NO: 1055
  REGION 1..330: note = Synthetic Peptide

SEQ ID NO: 1091 - protein, 330 aa, synthetic construct; identical to SEQ ID NO: 1055
  REGION 1..330: note = Synthetic Peptide

SEQ ID NO: 1092 - protein, 106 aa, synthetic construct; identical to SEQ ID NO: 1056
  REGION 1..106: note = Synthetic Peptide

SEQ ID NO: 1093 - protein, 249 aa, synthetic construct
  REGION 1..249: note = Synthetic Peptide
QVQLVESGGGVVQPGRSLRLSCVVSGFNFSNNGMHWVRQAPGKGLEWVAVISNDGSNKYYADSVKGRFTISRDNSKNTLYLQMNSLRTEDTAVYYCAKVYYGSGIYYKNRNYYGMDVWGQGTTVTVSSGGGGSGGGGSGGGGSSYELTQPPSVSVALGQTARITCGGNNIGSQNVHWYQQKPGQAPVLVIYRDSNRPSGIPDRFSGSKSGNTATLTISRAQAGDEADYYCQVWDSSTVVFGGGTKLTVL

SEQ ID NO: 1094 - protein, 249 aa, synthetic construct
  REGION 1..249: note = Synthetic Peptide
QVQLVESGGGVVQPGRSLRLSCAASGFNFSNYGMHWVRQAPGKGLEWVAVISYDGSNKYYADSVKGRFTISRDNSKNTLYLQMNSLRAEDTAVYFCARVYYGSGIYYKKRYYYGMDVWGQGTTVTVSSGGGGSGGGGSGGGGSSYELTQPPSVSVALGQTARITCGGHNIGSKGVHWYQQKPGQAPVLVIYRNSNRPSGIPERFSGSNSGNTATLTITRAQAGDEADYYCQVWDSSTVVFGGGTKLTVL

SEQ ID NO: 1095 - protein, 249 aa, synthetic construct
  REGION 1..249: note = Synthetic Peptide
QVQLVESGGGVVQPGRSLRLSCAPSGFNFSNYGMHWVRQAPGKGLEWVAVISYDGSNKYYADSVKGRFTISRDNSKNTLFLQMNSLRAEDTAVYFCARVYYGSGSYYKKRYYYGMDVWGQGTTVTVSSGGGGSGGGGSGGGGSSYELTQPPSVSVALGQTARITCGGNNIGSQNVHWYQQKPGQAPVLVIYRDSNRPSGIPERFSGSKSGNTATLTISRAQAGDEADYYCQVWDSSTVVFGGGTQLTVL

SEQ ID NO: 1096 - protein, 249 aa, synthetic construct
  REGION 1..249: note = Synthetic Peptide
QVQLVESGGGVVQPGRSLRLSCAASGFTFSSSGMHWVRQAPGKGLEWVAVISYDGTNKYYADSVKGRFTISRDNSKNTLYLQMNSLRAEDTAVYYCAKVYYGSGIYYKNRYYYGMDVWGQGTTVTVSSGGGGSGGGGSGGGGSSYELTQPPSVSVALGQTARITCGGHNIGSKGVHWYQQKPGQAPVLVIYRNSNRPSGIPERFSGSNSGNTATLTISRAQAGDEADYYCQVWDSSTVVFGGGTQLTVL

SEQ ID NO: 1097 - protein, 249 aa, synthetic construct
  REGION 1..249: note = Synthetic Peptide
QVQLVESGGGVVQPGRSLRLSCAVSGFNFSNYGMHWVRQVPGRGLDWVAVISNDGSNKYYADSVKGRFTISRDNSKNTLYLQMDSLRTEDTAVYYCAKVYYGSGIYYKKRYYYGMDVWGQGTTVTVSSGGGGSGGGGSGGGGSSYELTQPPSVSVALGQTARITCGGHNIGSQNVHWYQQKPGQAPVLVIYRDSNRPSGIPERFSGSKSGNTATLTISRAQAGDEADYYCQVWDSSTVVFGGGTQLTVL

SEQ ID NO: 1098 - protein, 249 aa, synthetic construct
  REGION 1..249: note = Synthetic Peptide
QVQLVESGGGVVQPGRSLRLSCAASGFNFSNYGMHWVRQAPGKGLEWVAVISYDGSNKYYADSVKGRFTISRDNSKNTLYLQMNSLRAEDTAVYFCARVYYGSGIYYKKRYYYGMDVWGQGTTVTVSSGGGGSGGGGSGGGGSSYELTQPPSVSVAPGQTARITCGGNNIGSKNVHWYQQKAGQAPVQVIYRNSNRPSGIPARFSGSNSGNTATLTISRAQAGDEADYYCQVWDSSTVVFGGGTKLTVL

SEQ ID NO: 1099 - protein, 248 aa, synthetic construct
  REGION 1..248: note = Synthetic Peptide
QVQLVESGGGVVQPGRSLRLSCAASGFTFSSYGMHWVRQAPGKGLEWVAVISYDGSNKYYADSVKGRFTISRDNSKNTLYLQMNSLRGEDTAVYYCARVYYGSGSYYKNRYYYGMDVWGQGTTVTVSSGGGGSGGGGSGGGGSSYELTQPPSVSVAPGQTARIPCGGNNIGSKNVHWYQQKPGQAPVLVIYRDINRPSGIPERFSGSNSGNTATLTISRAQAGDEADYYCQVWDSSVVFGGGTKLTVL

SEQ ID NO: 1100 - protein, 249 aa, synthetic construct
  REGION 1..249: note = Synthetic Peptide
QVQLVESGGGVVQPGRSLRLSCAASGFNFSNYGMHWVRQAPGKGLEWVAVISYDGSNKYYADSVKGRFTISRDNSKNTLYLQMNSLRAEDTAVYFCARVYYGSGIYYKKRYYYGMDVWGQGTTVTVSSGGGGSGGGGSGGGGSSYELTQPPSVSVALGQTARLTCEGNNIGSKNVHWYQQKPGQAPVLVIYRNSNRPSGIPERFSGSNSGNTATLTISRVQAGDEADYYCQAWDSSTVVFGGGTQLTVL

SEQ ID NO: 1101 - protein, 251 aa, synthetic construct
  REGION 1..251: note = Synthetic Peptide
QVQLVESGGGLVKPGGSLRLSCAVSGFNFSNNGMHWVRQAPGKGLEWVAVISYDGSNKYYTDSVKGRFTISRDNSKNTLYLQMNSLRTEDTAVYYCAKVYYGSGIYYKKRYYYGMDVWGQGTTVTVSSGGGGSGGGGSGGGGSSYELTQPLSVSEALGQTARITCGGNNIGSKNVHWYQQKPGQAPVLVIYRDSNRPSGIPERFSGSNSGNAATLTISRVEAGDEADYYCQVWDSSSDHVVFGGGTQLTVL

SEQ ID NO: 1102 - protein, 249 aa, synthetic construct
  REGION 1..249: note = Synthetic Peptide
QVQLVESGGGVVQPGRSLRLSCAASGFNFSNYGMHWVRQAPGKGLEWVAVISYDGSNKYYADSVKGRFTISRDNSKNTLYLQMNSLRAEDTAVYFCARVYYGSGIYYKKRYYYGMDVWGQGTTVTVSSGGGGSGGGGSGGGGSSYELTQPPSVSVAPGQTARITCGGNNIGSKNVHWYQQKPGQAPVLVIYRNSNRPSGIPERFSGSNSGNTATLTISGTQAMDEADYYCQAWDSSNVVFGGGTQLTVL

SEQ ID NO: 1103 - protein, 249 aa, synthetic construct
  REGION 1..249: note = Synthetic Peptide
QVQLVESGGGVVQPGRSLRLSCVVSGFNFSRNGMHWVRQVPGRGLDWVAVISNDGSNKYYADSVKGRFTISRDNSKNTLYLQMNSLRAEDTAVYYCAKVYYGSGIYYKNNYYYGMDVWGQGTTVTVSSGGGGSGGGGSGGGGSSYELTQPLSVSVALGQTARITCGGNNIGSQNVHWYQQKPGQAPVLVIYRDSNRPSGIPDRFSGSKSGNTATLTISRAQAGDEADYYCQVWDSSTVVFGGGTQLTVL

SEQ ID NO: 1104 - protein, 249 aa, synthetic construct
  REGION 1..249: note = Synthetic Peptide
QVQLVESGGGVVQPGRSLRLSCVVSGFNFSRNGMHWVRQVPGRGLDWVAVISNDGSNKYYADSVKGRFTISRDNSKNTLYLQMNSLRAEDTAVYYCAKVYYGSGIYYKNRYYYGMDVWGQGTTVTVSSGGGGSGGGGSGGGGSSYELTQPPSVSVAPGQTARITCGGNNIGSKNVHWYQQKPGQAPVLVIYRDSNRPSGIPERFSGSKSGTTATLTISRAQAGDEAEYYCQVWDSSTVVFGGGTELTVL

SEQ ID NO: 1105 - protein, 249 aa, synthetic construct
  REGION 1..249: note = Synthetic Peptide
QVQLVESGGGVVQPGRSLRLSCAASGFNFSNYGMHWVRQAPGKGLEWVAVISYDGSNKYYADSVKGRFTISRDNSKNTLYLQMNSLRAEDTAVYFCARVYYGSGIYYKKRYYYGMDVWGQGTTVTVSSGGGGSGGGGSGGGGSSYELTQPLSVSVALGQTARITCGGNNIGSKNVHWYQQKPGQAPVLAIYRNSNRPSGIPERFTGSNSGNTATLTISRAQAGDESDYYCQIWDSSTVVFGGGTKLTVL

SEQ ID NO: 1106 - protein, 249 aa, synthetic construct
  REGION 1..249: note = Synthetic Peptide
QVQLVESGGGVVQPGRSLRLSCAASGFNFSRNGMHWVRQVPGRGLDWVAVISNDGSNKYYADSVKGRFTISRDNSKNTLYLQMNSLRAEDTAVYYCAKVYYGSGIYYKKNYYYGMDVWGQGTTVTVSSGGGGSGGGGSGGGGSSYELTQPPSVSVALGQTARISCGGNNIGSKNVHWYQQKPGQAPVLVIYRDSNRPSGIPERFSGSKSGTTATLTISRAQAGDEAEYYCQVWDSSTVVFGGGTQLTVL

SEQ ID NO: 1107 - protein, 249 aa, synthetic construct
  REGION 1..249: note = Synthetic Peptide
QVQLVESGGGVVQPGRSLRLSCAVSGFNFSNNGMHWVRQAPGKGLEWVAVISYDGSNKYYTDSVKGRFTISRDNSKNTLYLQMNSLRTEDTAVYYCAKVYYGSGIYYKKRYYYGMDVWGQGTTVTVSSGGGGSGGGGSGGGGSSYELTQPPSVSVALGQTARITCEGNNIGSQNVHWYQQKPGQAPVLVMYRDSNRPSGIPERFSGSKSGNTATLAISRAQAGDESDYYCQVWDGSAVVFGGGTKLTVL

SEQ ID NO: 1108 - protein, 249 aa, synthetic construct
  REGION 1..249: note = Synthetic Peptide
QVQLVESGGGVVQPGRSLRLSCAASGFTFSSYGMHWVRQAPGKGLEWVAVISYDGSNKYYADSVKGRFTISRDNSKNTLYLQMNSLRAEDTAVYFCARVYYGSGIYYKKRYYYGMDVWGQGTTVTVSSGGGGSGGGGSGGGGSSYELTQPLSVSVALGQTARITCEGNNIGSQNVHWYQQKPGQAPVLVMYRDSNRPSGIPERFSGSKSGNTATLAISRAQAGDESDYYCQVWDGSAVVFGGGTQLTVL

SEQ ID NO: 1109 - protein, 249 aa, synthetic construct
  REGION 1..249: note = Synthetic Peptide
QVQLVESGGGVVQPGRSLRLSCAASGFTFSNYGFHWVRQTPGKGLEWVAVISYDGSNRYYADSVKGRFTISRDNSKNTLYLQMNSLRGEDTALYYCARVYYGSGTYYKNRYYYGMDVWGQGTTVTVSSGGGGSGGGGSGGGGSSYELTQPPSVSVALGQTARITCGGHNIGSKGVHWYQQKPGQAPVLVIYRNSNRPSGIPERFSGSNSGNTATLTISGTQAMDEADYYCQAWDSGTVVFGGGTQLTVL

SEQ ID NO: 1110 - protein, 251 aa, synthetic construct
  REGION 1..251: note = Synthetic Peptide
QVQLVESGGGVVQPGRSLRLSCAASGFTFSNYGFHWVRQTPGKGLEWVAVISYDGSNRYYADSVKGRFTISRDNSKNTLYLQMNSLRGEDTALYYCARVYYGSGTYYKNRYYYGMDVWGQGTTVTVSSGGGGSGGGGSGGGGSSYELTQPPSVSVALGQTARITCGANNIGSKNVHWYQQKPGQPPVLVIYRDFNRPSGIPERFSASNSGNTATLTISRGQAGDEADYYCQVWDSSTGNVVFGGGTKLTVL

SEQ ID NO: 1111 - protein, 249 aa, synthetic construct
  REGION 1..249: note = Synthetic Peptide
QVQLVESGGGVVQPGRSLRLSCAASGFIFSNYGFHWVRQTPGKGLEWVAVISYDGSNKYYADSVKGRFTISRDNSKNTLYLQMNSLRGEDTAVYYCARVYYGSGSYYKNRYYYGMDVWGQGTTVTVSSGGGGSGGGGSGGGGSSYELTQPPSVSVAPGQTARITCGGNNIGSKNVHWYQQKPGQAPVLVIYRDSNRPSGIPERFSGSKSGTTATLTISRAQAGDEADYYCQVWDSSTVVFGGGTELTVL

SEQ ID NO: 1112 - protein, 251 aa, synthetic construct
  REGION 1..251: note = Synthetic Peptide
QVQLVESGGGVVQPGRSLRLSCAASGFNFSNYGMHWVRQAPGKGLEWVAVISYDGSNKYYADSVKGRFTISRDNSKNTLYLQMNSLRAEDTAVYFCARVYYGSGIYYKKRYYYGMDVWGQGTTVTVSSGGGGSGGGGSGGGGSSYELTQSSSVSVAPGQTARITCGGNNIGSKNVHWYQQKPGQAPVLVIYRDSNRPSGIPERFSGSKSGTTATLTISRVEAGDEADYYCQVWDSSSAHVIFGGGTKLTVL

SEQ ID NO: 1113 - protein, 249 aa, synthetic construct
  REGION 1..249: note = Synthetic Peptide
QVQLVESGGGVVQPGRSLRLSCGASGFTFSGYGMHWVRQAPGKGLEWVAVISYDGSNKYYADSVKGRFTISRDNSKNTLYLQMNSLRGEDTAVYYCARVYYGSGIYYKNRYYYGMDVWGQGTTVTVSSGGGGSGGGGSGGGGSSYELTQPPSGSVALGQTARITCGGNNLGSKNVHWYQQKPGQAPVLVIYRNSNRPSGIPERFSGSNSGNTATLTISRAQAGDEADYYCQVWDSSTVVFGGGTKLTVL

SEQ ID NO: 1114 - protein, 249 aa, synthetic construct
  REGION 1..249: note = Synthetic Peptide
QVQLVESGGGLVKPGGSLRLSCAASGFTFSNNGMHWVRQAPGKGLEWVAVISYDGSNKYYADSVKGRFTISRDNSKNTLYLQMNSLRAEDTAVYYCAKVYYGSGIYYKNRYYYGMDVWGQGTTVTVSSGGGGSGGGGSGGGGSSYELTQPPSVSVALGQTARITCGGNRIGSKNVHWYQQKPGQAPVLVIYRDSNRPSGIPERFSGSKSGTTATLTISRAQAGDEAEYYCQVWDSSTVVFGGGTKLTVL

SEQ ID NO: 1115 - protein, 249 aa, synthetic construct
  REGION 1..249: note = Synthetic Peptide
QVQLVESGGGVVQPGRSLRLSCAASGFTFSNYGFHWVRQTPGKGLEWVAVISYDGSNRYYADSVKGRFTISRDNSKNTLYLQMNSLRGEDTALYYCARVYYGSGTYYKNRYYYGMDVWGQGTTVTVSSGGGGSGGGGSGGGGSSYELTQLPSVSVALGQTARITCGGHNIGSKGVHWYQQKPGQAPVLVIYRNSNRPSGIPERFSGSNSGNTATLTISRAQAGDEADYYCQVWDSSTVVFGGGTELTVL

SEQ ID NO: 1116 - protein, 249 aa, synthetic construct
  REGION 1..249: note = Synthetic Peptide
QVQLVESGGGVVQPGRSLRLSCAASGFNFSNYGMHWVRQAPGKGLEWVAVISYDGSNKYYADSVKGRFTISRDNSKNTLYLQMNSLRAEDTAVYFCARVYYGSGIYYKNRYYYGMDVWGQGTTVTVSSGGGGSGGGGSGGGGSSYELTQPPSVSVALGQTARITCGGHNIGSKGVHWYQQKPGQAPVLVIYRNSNRPSGIPERFSGSNSGNTATLTISRAQAGDEADYYCQVWDSSTVVFGGGTQLTVL

SEQ ID NO: 1117 - protein, 249 aa, synthetic construct
  REGION 1..249: note = Synthetic Peptide
QVQLVESGGDLVQPGRSLRLSCAASGFTFSNNGMHWVRQAPGKGLEWVAVISNDGSNKYYADSVRGRFTISRDNSKNTLYLQMNSLRAEDTAVYYCAKVYYGSGIYYKNRYYYGMDVWGQGTTVTVSSGGGGSGGGGSGGGGSSYELTQPLSVSVALGQTARITCGGNNIGSKNVHWYQQKPGQAPVLVIYRNSNRPSGIPERFSGSNSGNTATLTLSRVQAGDEADYYCQVWDSSTVVFGGGTKLTVL

SEQ ID NO: 1118 - protein, 249 aa, synthetic construct
  REGION 1..249: note = Synthetic Peptide
QVQLVESGGGVVQPGRSLRLSCAVSGFNFSNNGMHWVRQAPGKGLEWVAVISNDGSNKYYADSVRGRFTISRDNSKNTLYLQMDSLRTEDTAVYYCAKVYYGSGIYYKNRYYYGMDVWGQGTTVTVSSGGGGSGGGGSGGGGSSYELTQPPSVSVALGQTARLTCEGNNIGSKNVHWYQQKPGQAPVLVIYRDSNRPSGIPERFSGSKSGNTATLAISRAQAGDESDYYCQVWDSSAVVFGGGTKLTVL

SEQ ID NO: 1119 - protein, 249 aa, synthetic construct
  REGION 1..249: note = Synthetic Peptide
QVQLVESGGGVVQPGRSLRLSCAASGFTFSSSGMHWVRQAPGKGLEWVAVISNDGSNKYYADSVKGRFTISRDNSKNTLYLQMNSLRAEDTAVYYCAKVYYGSGIYYKNNYYYGMDVWGQGTTVTVSSGGGGSGGGGSGGGGSSYELTQPPSVSVALGQTARITCGGNNIGSKNVHWYQQKPGQAPVLAIYRNSNRPSGIPERFTGSNSGNTATLTISGTQAMDEADYYCQAWDSSTVVFGGGTKLTVL

SEQ ID NO: 1120 - protein, 249 aa, synthetic construct
  REGION 1..249: note = Synthetic Peptide
QVQLVESGGGVVQPGRSLRLSCAASGFNFSNYGMHWVRQAPGKGLEWVAVISYDGSNKYYADSVKGRFTISRDNSKNTLYLQMNSLRAEDTAVYFCARVYYGSGIYYKKRYYYGMDVWGQGTTVTVSSGGGGSGGGGSGGGGSSYELTQPPSVSVALGQTARITCGGNNIGSQNVHWYQQKPGQAPVLVIYRDSNRPSGIPERFSGSKSGNTATLAISRAQAGDESDYYCQVWDSSAVVFGGGTQLTVL

SEQ ID NO: 1121 - protein, 249 aa, synthetic construct
  REGION 1..249: note = Synthetic Peptide
QVQLVESGGGVVQPGRSLRLSCAASGFTLSSSGMHWVRQAPGKGLEWVAVISNDGSNKYYADSVKGRFTISRDDSKNTLYLQMDSLRTEDTAVYYCAKVYYGSGIYYKNRYYYGMDVWGQGTTVTVSSGGGGSGGGGSGGGGSSYELTQPPSVSVALGQTARISCGGNNIGSKNVHWYQQKPGQAPVLVMYRDSNRPSGIPERFSGSNSGNTATLTISGTQAMDEADYYCQAWDSGTVVFGGGTKLTVL

SEQ ID NO: 1122 - protein, 249 aa, synthetic construct
  REGION 1..249: note = Synthetic Peptide
QVQLVESGGGVVQPGRSLRLSCAASGFNFSNYGMHWVRQAPGKGLEWVAVISYDGSNKYYADSVKGRFTISRDNSKNTLYLQMNSLRAEDTAVYFCARVYYGSGIYYKKRYYYGMDVWGQGTTVTVSSGGGGSGGGGSGGGGSSYELTQPPSVSVALGQTARITCGGNNIGGKNVHWYQQKPGQAPVLVIYRDSNRPSGIPERFSGSKSGNTATLTISRAQAGDESDYYCQVWDSSTVVFGGGTQLTVL

SEQ ID NO: 1123 - protein, 249 aa, synthetic construct
  REGION 1..249: note = Synthetic Peptide
QVQLVESGGGVVQPGRSLRLSCVVSGFNFSRNGMHWVRQVPGRGLDWVAVISNDGSNKYYADSVKGRFTISRDNSKNTLYLQMNSLRAEDTAVYYCAKVYYGSGIYYKNNYYYGMDVWGQGTTVTVSSGGGGSGGGGSGGGGSSYELTQPLSVSVALGQTARITCGGNNIGSKNVHWYQQKPGQAPVLVIYRNSNRPSGIPERFSGSNSGNTATLTISRAQAGDEADYYCQVWDSSTVVFGGGTKLTVL

SEQ ID NO: 1124 - protein, 249 aa, synthetic construct
  REGION 1..249: note = Synthetic Peptide
QVQLVESGGGLVKPGGSLRLSCAASGFNFSRNGMHWVRQVPGRGLDWVAVISNDGSNKYYADSVKGRFTISRDNSKNTLYLQMNSLRAEDTAVYYCAKVYYGSGIYYKNNYYYGMDVWGQGTTVTVSSGGGGSGGGGSGGGGSSYELTQPPSVSVALGQTARISCGGNNIESKNVHWYQQKPGQAPVLVIYRDSNRPSGIPERFSGSKSGTTATLTISRAQAGDEAEYYCQVWDSSTVVFGGGTQLTVL

SEQ ID NO: 1125 - protein, 445 aa, synthetic construct; identical to SEQ ID NO: 354
  REGION 1..445: note = Synthetic Peptide

SEQ ID NO: 1126 - protein, 220 aa, synthetic construct
  REGION 1..220: note = Synthetic Peptide
DIVMTQSPDSLAVSLGERATINCKSSQSVLYSSNNRNYLAWYHQKPGQSPKLLISWASTRESGVPDRFSGSGSGTDFTLTINSLQAEDVAVYYCQQYYSIPITFGGGTKVEIKRTVAAPSVFIFPPSDEQLKSGTASVVCLLNNFYPREAKVQWKVDNALQSGNSQESVTEQDSKDSTYSLSSTLTLSKADYEKHKVYACEVTHQGLSSPVTKSFNRGEC

SEQ ID NO: 1127 - protein, 458 aa, synthetic construct
  REGION 1..458: note = Synthetic Peptide
QVQLVESGGGVVQPGRSLRLSCAASGFTFSNYGFHWVRQTPGKGLEWVAVISYDGSNRYYASSVKGRFTISRDNSKNTLYLQMNSLRGEDTALYYCARVYYGSGTYYKNRYYYGMDVWGQGTTVTVSSASTKGPSVFPLAPSSKSTSGGTAALGCLVKDYFPEPVTVSWNSGALTSGVHTFPAVLQSSGLYSLSSVVTVPSSSLGTQTYICNVNHKPSNTKVDKKVEPKSCDKTHTCPPCPAPELLGGPSVFLFPPKPKDTLMISRTPEVTCVVVDVSHEDPEVKFNWYVDGVEVHNAKTKPREEQYNSTYRVVSVLTVLHQDWLNGKEYKCKVSNKALPAPIEKTISKAKGQPREPQVYTLPPSREEMTKNQVSLTCLVKGFYPSDIAVEWESNGQPENNYKTTPPVLDSDGSFFLYSKLTVDKSRWQQGNVFSCSVMHEALHNHYTQKSLSLSPGK

SEQ ID NO: 1128 - protein, 212 aa, synthetic construct
  REGION 1..212: note = Synthetic Peptide
SYELTQPPSVSVALGQTARITCGGHNIGSKGVHWYQQKPGQAPVLVIYRAANRPSGIPERFSGSNSGNTATLTISGTQAGDEADYYCQAFDAGTVVFGGGTQLTVLGQPKAAPSVTLFPPSSEELQANKATLVCLISDFYPGAVTVAWKADSSPVKAGVETTTPSKQSNNKYAASSYLSLTPEQWKSHRSYSCQVTHEGSTVEKTVAPTECS

SEQ ID NO: 1129 - protein, 458 aa, synthetic construct
  REGION 1..458: note = Synthetic Peptide
QVQLVESGGGVVQPGRSLRLSCAASGFTFSNYGFHWVRQTPGKGLEWVAVISYAGSNRYYAASVKGRFTISRDNSKNTLYLQMNSLRGEDTALYYCARVYYGSGTYYKNRYYYGMDVWGQGTTVTVSSASTKGPSVFPLAPSSKSTSGGTAALGCLVKDYFPEPVTVSWNSGALTSGVHTFPAVLQSSGLYSLSSVVTVPSSSLGTQTYICNVNHKPSNTKVDKKVEPKSCDKTHTCPPCPAPELLGGPSVFLFPPKPKDTLMISRTPEVTCVVVDVSHEDPEVKFNWYVDGVEVHNAKTKPREEQYNSTYRVVSVLTVLHQDWLNGKEYKCKVSNKALPAPIEKTISKAKGQPREPQVYTLPPSREEMTKNQVSLTCLVKGFYPSDIAVEWESNGQPENNYKTTPPVLDSDGSFFLYSKLTVDKSRWQQGNVFSCSVMHEALHNHYTQKSLSLSPGK

SEQ ID NO: 1130 - protein, 212 aa, synthetic construct
  REGION 1..212: note = Synthetic Peptide
SYELTQPPSVSVALGQTARITCGGHNIGSKGVHWYQQKPGQAPVLVIYRQSNRPSGIPERFSGSNSGNTATLTISGTQAEDEADYYCQAFDAGTVVFGGGTQLTVLGQPKAAPSVTLFPPSSEELQANKATLVCLISDFYPGAVTVAWKADSSPVKAGVETTTPSKQSNNKYAASSYLSLTPEQWKSHRSYSCQVTHEGSTVEKTVAPTECS

SEQ ID NO: 1131 - protein, 458 aa, synthetic construct
  REGION 1..458: note = Synthetic Peptide
QVQLVESGGGVVQPGRSLRLSCAASGFTFSNYGFHWVRQTPGKGLEWVAVISYSGSNRYYADSVKGRFTISRDNSKNTLYLQMNSLRGEDTALYYCARVYYGSGTYYKNRYYYGMDVWGQGTTVTVSSASTKGPSVFPLAPSSKSTSGGTAALGCLVKDYFPEPVTVSWNSGALTSGVHTFPAVLQSSGLYSLSSVVTVPSSSLGTQTYICNVNHKPSNTKVDKKVEPKSCDKTHTCPPCPAPELLGGPSVFLFPPKPKDTLMISRTPEVTCVVVDVSHEDPEVKFNWYVDGVEVHNAKTKPREEQYNSTYRVVSVLTVLHQDWLNGKEYKCKVSNKALPAPIEKTISKAKGQPREPQVYTLPPSREEMTKNQVSLTCLVKGFYPSDIAVEWESNGQPENNYKTTPPVLDSDGSFFLYSKLTVDKSRWQQGNVFSCSVMHEALHNHYTQKSLSLSPGK

SEQ ID NO: 1132 - protein, 212 aa, synthetic construct
  REGION 1..212: note = Synthetic Peptide
SYELTQPPSVSVALGQTARITCGGHNIGSKGVHWYQQKPGQAPVLVIYRQSNRPSGIPERFSGSNSGNTATLTISGTQAGDEADYYCQAFDAGTVVFGGGTQLTVLGQPKAAPSVTLFPPSSEELQANKATLVCLISDFYPGAVTVAWKADSSPVKAGVETTTPSKQSNNKYAASSYLSLTPEQWKSHRSYSCQVTHEGSTVEKTVAPTECS

SEQ ID NO: 1133 - protein, 212 aa, synthetic construct
  REGION 1..212: note = Synthetic Peptide
SYELTQPLSVSVALGQTARITCGGHNIGSKGVHWYQQKPGQAPVLVIYRNSNRPSGIPERFSGSNSGNTATLTISRAQAGDEADYYCQVWDISTVVFGGGTELTVLGQPKAAPSVTLFPPSSEELQANKATLVCLISDFYPGAVTVAWKADSSPVKAGVETTTPSKQSNNKYAASSYLSLTPEQWKSHRSYSCQVTHEGSTVEKTVAPTECS

SEQ ID NO: 1134 - protein, 458 aa, synthetic construct
  REGION 1..458: note = Synthetic Peptide
QVQLVESGGGVAQPGRSLRLSCAASGFNFSNCGMHWVRQAPGKGLEWVAVISYDGGNKYHADSVKGRFTISRDDSKNTLYLQMDSLRTEDTAVYYCAKVYYGSGIYYKNRYYYGMDVWGQGTTVTVSSASTKGPSVFPLAPSSKSTSGGTAALGCLVKDYFPEPVTVSWNSGALTSGVHTFPAVLQSSGLYSLSSVVTVPSSSLGTQTYICNVNHKPSNTKVDKKVEPKSCDKTHTCPPCPAPELLGGPSVFLFPPKPKDTLMISRTPEVTCVVVDVSHEDPEVKFNWYVDGVEVHNAKTKPREEQYNSTYRVVSVLTVLHQDWLNGKEYKCKVSNKALPAPIEKTISKAKGQPREPQVYTLPPSREEMTKNQVSLTCLVKGFYPSDIAVEWESNGQPENNYKTTPPVLDSDGSFFLYSKLTVDKSRWQQGNVFSCSVMHEALHNHYTQKSLSLSPGK

SEQ ID NO: 1135 - protein, 212 aa, synthetic construct
  REGION 1..212: note = Synthetic Peptide
SYELTQPLSVSVALGQTARITCGGHNIGSKGVHWYQQKPGQAPVLVIYRNSNRPSGIPERFSGSNSGKTATLTISRAQAGDEADYYCQVWDSSTVVFGGGTELTVLGQPKAAPSVTLFPPSSEELQANKATLVCLISDFYPGAVTVAWKADSSPVKAGVETTTPSKQSNNKYAASSYLSLTPEQWKSHRSYSCQVTHEGSTVEKTVAPTECS

SEQ ID NO: 1136 - protein, 458 aa, synthetic construct
  REGION 1..458: note = Synthetic Peptide
QVQLVESGGGVAQPGRSLRLSCAASGFNFSNCGMHWVRQAPGKGLEWVAVISYDGGNKYYADSVKGRFTISRDDSKNTLYLQMDSLRTEDTAVYYCAKVYYGSGIYYKNRYYYGMDVWGQGTTVTVSSASTKGPSVFPLAPSSKSTSGGTAALGCLVKDYFPEPVTVSWNSGALTSGVHTFPAVLQSSGLYSLSSVVTVPSSSLGTQTYICNVNHKPSNTKVDKKVEPKSCDKTHTCPPCPAPELLGGPSVFLFPPKPKDTLMISRTPEVTCVVVDVSHEDPEVKFNWYVDGVEVHNAKTKPREEQYNSTYRVVSVLTVLHQDWLNGKEYKCKVSNKALPAPIEKTISKAKGQPREPQVYTLPPSREEMTKNQVSLTCLVKGFYPSDIAVEWESNGQPENNYKTTPPVLDSDGSFFLYSKLTVDKSRWQQGNVFSCSVMHEALHNHYTQKSLSLSPGK

SEQ ID NO: 1137 - protein, 212 aa, synthetic construct
  REGION 1..212: note = Synthetic Peptide
SYELTQPLSVSVALGQTARITCGGNNIGSKNVHWYQKRPGQAPVLVIYRDSNRPSGIPERFSGSKSGNTATLTISRAQAGDEADYYCQVWDSNTVVFGGGTNLTVLGQPKAAPSVTLFPPSSEELQANKATLVCLISDFYPGAVTVAWKADSSPVKAGVETTTPSKQSNNKYAASSYLSLTPEQWKSHRSYSCQVTHEGSTVEKTVAPTECS

SEQ ID NO: 1138 - protein, 458 aa, synthetic construct
  REGION 1..458: note = Synthetic Peptide
QVQLVESGGGVVQPGRSLRLSCVVSGFNFSNNGMHWVRQAPGKGLEWVAVISNDGSNKYYADSVRGRFTISRDNSKNTLYLQMNSLRAEDTAVYSCAKVYYGSGIYYKNNYYYGMDVWGQGTTVTVSSASTKGPSVFPLAPSSKSTSGGTAALGCLVKDYFPEPVTVSWNSGALTSGVHTFPAVLQSSGLYSLSSVVTVPSSSLGTQTYICNVNHKPSNTKVDKKVEPKSCDKTHTCPPCPAPELLGGPSVFLFPPKPKDTLMISRTPEVTCVVVDVSHEDPEVKFNWYVDGVEVHNAKTKPREEQYNSTYRVVSVLTVLHQDWLNGKEYKCKVSNKALPAPIEKTISKAKGQPREPQVYTLPPSREEMTKNQVSLTCLVKGFYPSDIAVEWESNGQPENNYKTTPPVLDSDGSFFLYSKLTVDKSRWQQGNVFSCSVMHEALHNHYTQKSLSLSPGK

SEQ ID NO: 1139 - protein, 212 aa, synthetic construct
  REGION 1..212: note = Synthetic Peptide
SYELTQPLSVSVALGQTARITCGGNNIGSKNVHWYQQKAGQAPVQVIYRNSNRPSGIPERFSGSNSGNTATLTISRAQAGDEADYYCQVWDSSTVVFGGGTKLTVLGQPKAAPSVTLFPPSSEELQANKATLVCLISDFYPGAVTVAWKADSSPVKAGVETTTPSKQSNNKYAASSYLSLTPEQWKSHRSYSCQVTHEGSTVEKTVAPTECS

SEQ ID NO: 1140 - protein, 458 aa, synthetic construct
  REGION 1..458: note = Synthetic Peptide
QVQLVESGGGVVQPGRSLRLSCAASGFNFNTYGMHWVRQAPGKGLEWVAVISYDGSNKYYADSVKGRFTISRDNSKSTLYLQMNSLRAEDTAVYYCARVYYGSGSYYKKNYYYGMDVWGQGTTVTVSSASTKGPSVFPLAPSSKSTSGGTAALGCLVKDYFPEPVTVSWNSGALTSGVHTFPAVLQSSGLYSLSSVVTVPSSSLGTQTYICNVNHKPSNTKVDKKVEPKSCDKTHTCPPCPAPELLGGPSVFLFPPKPKDTLMISRTPEVTCVVVDVSHEDPEVKFNWYVDGVEVHNAKTKPREEQYNSTYRVVSVLTVLHQDWLNGKEYKCKVSNKALPAPIEKTISKAKGQPREPQVYTLPPSREEMTKNQVSLTCLVKGFYPSDIAVEWESNGQPENNYKTTPPVLDSDGSFFLYSKLTVDKSRWQQGNVFSCSVMHEALHNHYTQKSLSLSPGK

SEQ ID NO: 1141 - protein, 212 aa, synthetic construct
  REGION 1..212: note = Synthetic Peptide
SYELTQPLSVSVALGQTARITCGGNNIGGKNVHWYQQKPGQAPVLVIYRDSNRPSGIPERFSGSKSGNTATLTISRAQAGDESDYYCQVWDSSTVVFGGGTTLTVLGQPKAAPSVTLFPPSSEELQANKATLVCLISDFYPGAVTVAWKADSSPVKAGVETTTPSKQSNNKYAASSYLSLTPEQWKSHRSYSCQVTHEGSTVEKTVAPTECS

SEQ ID NO: 1142 - protein, 458 aa, synthetic construct
  REGION 1..458: note = Synthetic Peptide
QVQVVESGGGVVQPGRSLRLSCAASGFTLSSYGFHWVRQTPGKGLEWVAVISYDGSNKYYADSVKGRFTISRDNSKNTLYLQMNSLRGEDTAVYYCARVYYGSGTYYKNRYYYGMDVWGQGTTVTVSSASTKGPSVFPLAPSSKSTSGGTAALGCLVKDYFPEPVTVSWNSGALTSGVHTFPAVLQSSGLYSLSSVVTVPSSSLGTQTYICNVNHKPSNTKVDKKVEPKSCDKTHTCPPCPAPELLGGPSVFLFPPKPKDTLMISRTPEVTCVVVDVSHEDPEVKFNWYVDGVEVHNAKTKPREEQYNSTYRVVSVLTVLHQDWLNGKEYKCKVSNKALPAPIEKTISKAKGQPREPQVYTLPPSREEMTKNQVSLTCLVKGFYPSDIAVEWESNGQPENNYKTTPPVLDSDGSFFLYSKLTVDKSRWQQGNVFSCSVMHEALHNHYTQKSLSLSPGK

SEQ ID NO: 1143 - protein, 212 aa, synthetic construct
  REGION 1..212: note = Synthetic Peptide
SYELTQPLSVSEALGQTARITCGGNNIGSKNVHWYQQKPGQAPVLVIYRDSNRPSGIPERFSGSKSGNTATLTISRAQAGDEADYYCQVWDSSTVVFGGGTKVTVLGQPKAAPSVTLFPPSSEELQANKATLVCLISDFYPGAVTVAWKADSSPVKAGVETTTPSKQSNNKYAASSYLSLTPEQWKSHRSYSCQVTHEGSTVEKTVAPTECS

SEQ ID NO: 1144 - protein, 458 aa, synthetic construct
  REGION 1..458: note = Synthetic Peptide
QVQLVESGGGVVQPGRSLRLSCVVSGFNFINNGMHWVRQAPGKGLDWVAVISNDGSNKYYPDSVKGRFTISRDNSKNTLYLQMNSLRAEDSAVYYCAKVYYGSGNYYKNNYYYGMDVWGQGTTVTVSSASTKGPSVFPLAPSSKSTSGGTAALGCLVKDYFPEPVTVSWNSGALTSGVHTFPAVLQSSGLYSLSSVVTVPSSSLGTQTYICNVNHKPSNTKVDKKVEPKSCDKTHTCPPCPAPELLGGPSVFLFPPKPKDTLMISRTPEVTCVVVDVSHEDPEVKFNWYVDGVEVHNAKTKPREEQYNSTYRVVSVLTVLHQDWLNGKEYKCKVSNKALPAPIEKTISKAKGQPREPQVYTLPPSREEMTKNQVSLTCLVKGFYPSDIAVEWESNGQPENNYKTTPPVLDSDGSFFLYSKLTVDKSRWQQGNVFSCSVMHEALHNHYTQKSLSLSPGK

SEQ ID NO: 1145 - protein, 212 aa, synthetic construct
  REGION 1..212: note = Synthetic Peptide
SYELTQPLSVSVALGQTARITCEGNNIGSQNVHWYQQKPGQAPVLVMYRDSNRPSGIPERFSGSKSGNTATLAISRAQAGDESDYYCQVWDGSAVVFGGGTTLTVLGQPKAAPSVTLFPPSSEELQANKATLVCLISDFYPGAVTVAWKADSSPVKAGVETTTPSKQSNNKYAASSYLSLTPEQWKSHRSYSCQVTHEGSTVEKTVAPTECS

SEQ ID NO: 1146 - protein, 458 aa, synthetic construct
  REGION 1..458: note = Synthetic Peptide
QMQVVESGGGVVQPGRSLRLSCAASGFTFSSSGMHWVRQAPGKGLEWVAVISHDGSNKYYADSVKGRFTISRDNSKNTLYLQMNSLGGEDTAVYYCAKVYYGSGIYYKNRYYYGMDVWGQGTTVIVSSASTKGPSVFPLAPSSKSTSGGTAALGCLVKDYFPEPVTVSWNSGALTSGVHTFPAVLQSSGLYSLSSVVTVPSSSLGTQTYICNVNHKPSNTKVDKKVEPKSCDKTHTCPPCPAPELLGGPSVFLFPPKPKDTLMISRTPEVTCVVVDVSHEDPEVKFNWYVDGVEVHNAKTKPREEQYNSTYRVVSVLTVLHQDWLNGKEYKCKVSNKALPAPIEKTISKAKGQPREPQVYTLPPSREEMTKNQVSLTCLVKGFYPSDIAVEWESNGQPENNYKTTPPVLDSDGSFFLYSKLTVDKSRWQQGNVFSCSVMHEALHNHYTQKSLSLSPGK

SEQ ID NO: 1147 - protein, 212 aa, synthetic construct
  REGION 1..212: note = Synthetic Peptide
SYELTQPLSVSVALGQTARITCGGHNIGSKGVHWYQQKPGQAPVLVIYRNSNRPSGIPERFSGSNSGNTATLTISRAQAGDEADYYCQVWDSSTVVFGGGTELTVLGQPKAAPSVTLFPPSSEELQANKATLVCLISDFYPGAVTVAWKADSSPVKAGVETTTPSKQSNNKYAASSYLSLTPEQWKSHRSYSCQVTHEGSTVEKTVAPTECS

SEQ ID NO: 1148 - protein, 458 aa, synthetic construct
  REGION 1..458: note = Synthetic Peptide
QVQLVESGGGVAQPGRSLRLSCAASGFNFSDCGMHWVRQAPGKGLEWVAVISYDGGNKYYADSVKGRFTISRDDSKNTLYLQTDSLRTEDTAVYYCAKVYYGSGIYYKNRYYYGMDVWGQGTTVTVSSASTKGPSVFPLAPSSKSTSGGTAALGCLVKDYFPEPVTVSWNSGALTSGVHTFPAVLQSSGLYSLSSVVTVPSSSLGTQTYICNVNHKPSNTKVDKKVEPKSCDKTHTCPPCPAPELLGGPSVFLFPPKPKDTLMISRTPEVTCVVVDVSHEDPEVKFNWYVDGVEVHNAKTKPREEQYNSTYRVVSVLTVLHQDWLNGKEYKCKVSNKALPAPIEKTISKAKGQPREPQVYTLPPSREEMTKNQVSLTCLVKGFYPSDIAVEWESNGQPENNYKTTPPVLDSDGSFFLYSKLTVDKSRWQQGNVFSCSVMHEALHNHYTQKSLSLSPGK

SEQ ID NO: 1149 - protein, 212 aa, synthetic construct
  REGION 1..212: note = Synthetic Peptide
SYELTQPLSVSVALGQTGRITCGGNNIGSKNVHWYQQKPGQAPVLVIYRSSNRPSGIPERFSGSNSGNTATLTISRAQAGDESDYYCQIWDSSTVVFGGGTKLTVLGQPKAAPSVTLFPPSSEELQANKATLVCLISDFYPGAVTVAWKADSSPVKAGVETTTPSKQSNNKYAASSYLSLTPEQWKSHRSYSCQVTHEGSTVEKTVAPTECS

SEQ ID NO: 1150 - protein, 458 aa, synthetic construct
  REGION 1..458: note = Synthetic Peptide
QVQVVESGGGVVQPGRSLRLSCAASGFTFSSYGMHWVRQAPGKGLEWVAVISFDGNNKYYADSVKGRFTISRDNSKNTLYLQMNSLRGEDTAVYYCARVYYGSGSYYKNRYYYGMDVWGQGTTVTVSTASTKGPSVFPLAPSSKSTSGGTAALGCLVKDYFPEPVTVSWNSGALTSGVHTFPAVLQSSGLYSLSSVVTVPSSSLGTQTYICNVNHKPSNTKVDKKVEPKSCDKTHTCPPCPAPELLGGPSVFLFPPKPKDTLMISRTPEVTCVVVDVSHEDPEVKFNWYVDGVEVHNAKTKPREEQYNSTYRVVSVLTVLHQDWLNGKEYKCKVSNKALPAPIEKTISKAKGQPREPQVYTLPPSREEMTKNQVSLTCLVKGFYPSDIAVEWESNGQPENNYKTTPPVLDSDGSFFLYSKLTVDKSRWQQGNVFSCSVMHEALHNHYTQKSLSLSPGK

SEQ ID NO: 1151 - protein, 212 aa, synthetic construct
  REGION 1..212: note = Synthetic Peptide
SYELTQPLSVSVALGQTARITCGGNNIGSKNVHWYQQRPGQAPVLVIYRDSNRPSGIPERLSGSKAGNTATLTISRAHAGDEADYYCQVWDSSTVVFGGGTELTVQGQPKAAPSVTLFPPSSEELQANKATLVCLISDFYPGAVTVAWKADSSPVKAGVETTTPSKQSNNKYAASSYLSLTPEQWKSHRSYSCQVTHEGSTVEKTVAPTECS

SEQ ID NO: 1152 - protein, 458 aa, synthetic construct
  REGION 1..458: note = Synthetic Peptide
QVQLVESGGGVVQPGRSLRLSCAVSGFTFSSNGMHWVRQAPGKGLEWVAVISNDGSNKYYGDSVKGRFTISRDNSKNTLYLQMNSLRAEDTAVYYCAKVYYGSGIYYRNNYYYGMDVWGQGTTVTVSSASTKGPSVFPLAPSSKSTSGGTAALGCLVKDYFPEPVTVSWNSGALTSGVHTFPAVLQSSGLYSLSSVVTVPSSSLGTQTYICNVNHKPSNTKVDKKVEPKSCDKTHTCPPCPAPELLGGPSVFLFPPKPKDTLMISRTPEVTCVVVDVSHEDPEVKFNWYVDGVEVHNAKTKPREEQYNSTYRVVSVLTVLHQDWLNGKEYKCKVSNKALPAPIEKTISKAKGQPREPQVYTLPPSREEMTKNQVSLTCLVKGFYPSDIAVEWESNGQPENNYKTTPPVLDSDGSFFLYSKLTVDKSRWQQGNVFSCSVMHEALHNHYTQKSLSLSPGK

SEQ ID NO: 1153 - protein, 212 aa, synthetic construct
  REGION 1..212: note = Synthetic Peptide
SYELTQPLSVSVALGQTARITCGGNNIGSKNVHWYQQKPGQAPILVIYRNTNRPSGIPERFSGSNSGNTATLTISRAQVGDESDYFCQVWDSSTVVFGGGTKLTVLGQPKAAPSVTLFPPSSEELQANKATLVCLISDFYPGAVTVAWKADSSPVKAGVETTTPSKQSNNKYAASSYLSLTPEQWKSHRSYSCQVTHEGSTVEKTVAPTECS

SEQ ID NO: 1154 - protein, 458 aa, synthetic construct
  REGION 1..458: note = Synthetic Peptide
QVQVVESGGGVVQPGRSLRLSCGASGFTFSGYGMHWVRQAPGKGLEWVAVISYDGSNKYYADSVKGRFPISRDNSKNTLYLQMNSLRGEDTAVYYCARVYYGSGIYYKNRYYYGMDVWGQGTTVAVSSASTKGPSVFPLAPSSKSTSGGTAALGCLVKDYFPEPVTVSWNSGALTSGVHTFPAVLQSSGLYSLSSVVTVPSSSLGTQTYICNVNHKPSNTKVDKKVEPKSCDKTHTCPPCPAPELLGGPSVFLFPPKPKDTLMISRTPEVTCVVVDVSHEDPEVKFNWYVDGVEVHNAKTKPREEQYNSTYRVVSVLTVLHQDWLNGKEYKCKVSNKALPAPIEKTISKAKGQPREPQVYTLPPSREEMTKNQVSLTCLVKGFYPSDIAVEWESNGQPENNYKTTPPVLDSDGSFFLYSKLTVDKSRWQQGNVFSCSVMHEALHNHYTQKSLSLSPGK

SEQ ID NO: 1155 - protein, 212 aa, synthetic construct; identical to SEQ ID NO: 1153
  REGION 1..212: note = Synthetic Peptide

SEQ ID NO: 1156 - protein, 458 aa, synthetic construct
  REGION 1..458: note = Synthetic Peptide
QVQVVESGGGVVQPGRSLRLSCGASGFTFSGYGMHWVRQAPGKGLEWVAVISYDGSNKYYADSVKGRFTISRDNSKNTLYLQMNSLRGEDTAVYYCARVYYGSGIYYKNRYYYGMDVWGQGTTVAVSSASTKGPSVFPLAPSSKSTSGGTAALGCLVKDYFPEPVTVSWNSGALTSGVHTFPAVLQSSGLYSLSSVVTVPSSSLGTQTYICNVNHKPSNTKVDKKVEPKSCDKTHTCPPCPAPELLGGPSVFLFPPKPKDTLMISRTPEVTCVVVDVSHEDPEVKFNWYVDGVEVHNAKTKPREEQYNSTYRVVSVLTVLHQDWLNGKEYKCKVSNKALPAPIEKTISKAKGQPREPQVYTLPPSREEMTKNQVSLTCLVKGFYPSDIAVEWESNGQPENNYKTTPPVLDSDGSFFLYSKLTVDKSRWQQGNVFSCSVMHEALHNHYTQKSLSLSPGK

SEQ ID NO: 1157 - protein, 212 aa, synthetic construct
  REGION 1..212: note = Synthetic Peptide
SYDLTQPLSVSVALGQTARITCGGNNIGDKNVHWYQQKPGQAPVLVIYRNNVRPSGIPERFSGSNSGNTATLTISRAQAGDEADYYCQVWDSSTVVFGGGTKLTVLGQPKAAPSVTLFPPSSEELQANKATLVCLISDFYPGAVTVAWKADSSPVKAGVETTTPSKQSNNKYAASSYLSLTPEQWKSHRSYSCQVTHEGSTVEKTVAPTECS

SEQ ID NO: 1158 - protein, 458 aa, synthetic construct
  REGION 1..458: note = Synthetic Peptide
QVQLVESGGGVVQPGRSLRLSCAASGLNFSNFGMHWVRQAPGKGLDWVAVISYDGGNKYYADSVKGRFTVSRDNSKNTLFLQMNSLRAEDTALYYCAKVYYGSGSYYKKRYYYGMDVWGQGTTVTVSSASTKGPSVFPLAPSSKSTSGGTAALGCLVKDYFPEPVTVSWNSGALTSGVHTFPAVLQSSGLYSLSSVVTVPSSSLGTQTYICNVNHKPSNTKVDKKVEPKSCDKTHTCPPCPAPELLGGPSVFLFPPKPKDTLMISRTPEVTCVVVDVSHEDPEVKFNWYVDGVEVHNAKTKPREEQYNSTYRVVSVLTVLHQDWLNGKEYKCKVSNKALPAPIEKTISKAKGQPREPQVYTLPPSREEMTKNQVSLTCLVKGFYPSDIAVEWESNGQPENNYKTTPPVLDSDGSFFLYSKLTVDKSRWQQGNVFSCSVMHEALHNHYTQKSLSLSPGK

SEQ ID NO: 1159 - protein, 212 aa, synthetic construct
  REGION 1..212: note = Synthetic Peptide
SYELTQPLSVSVALGQTARITCGGNNIGSKNVHWYQQKPGQAPVLVIYRDSNRPSGIPERFSGSKSGNTATLTISRAQAGDEADYYCQVWDSSTVVFGGGAKLTVLGQPKAAPSVTLFPPSSEELQANKATLVCLISDFYPGAVTVAWKADSSPVKAGVETTTPSKQSNNKYAASSYLSLTPEQWKSHRSYSCQVTHEGSTVEKTVAPTECS

SEQ ID NO: 1160 - protein, 458 aa, synthetic construct
  REGION 1..458: note = Synthetic Peptide
QVQLVESGGGVVQPGRSLRLSCAASGFNFSSCGMHWVRQAPGKGLEWVAVISYDGTNKYYADSVKGRFTISRDNSKNTLYLQMNSLRAEDTAVYYCAKVYYGSGIYYKKNYYYGMDVWGQGTTVTVSSASTKGPSVFPLAPSSKSTSGGTAALGCLVKDYFPEPVTVSWNSGALTSGVHTFPAVLQSSGLYSLSSVVTVPSSSLGTQTYICNVNHKPSNTKVDKKVEPKSCDKTHTCPPCPAPELLGGPSVFLFPPKPKDTLMISRTPEVTCVVVDVSHEDPEVKFNWYVDGVEVHNAKTKPREEQYNSTYRVVSVLTVLHQDWLNGKEYKCKVSNKALPAPIEKTISKAKGQPREPQVYTLPPSREEMTKNQVSLTCLVKGFYPSDIAVEWESNGQPENNYKTTPPVLDSDGSFFLYSKLTVDKSRWQQGNVFSCSVMHEALHNHYTQKSLSLSPGK

SEQ ID NO: 1161 - protein, 445 aa, synthetic construct; identical to SEQ ID NO: 354
  REGION 1..445: note = Synthetic Peptide

SEQ ID NO: 1162 - protein, 220 aa, synthetic construct; identical to SEQ ID NO: 16
  REGION 1..220: note = Synthetic Peptide

SEQ ID NO: 1163 - DNA, 747 bp, synthetic construct
  misc_feature 1..747: note = Synthetic Peptide
  source 1..747: mol_type = other DNA
caggtgcagctggtggagtctgggggaggcgtggtccagcctgggaggtccctgagactctcctgtgtagtctctggattcaacttcagtaacaatggcatgcactgggtccgccaggctccaggcaagggactggagtgggtggcagttatttcaaatgatggaagtaataaatactatgcagactccgtgaagggccgattcaccatctccagagacaattccaagaacacgctgtatctacaaatgaacagcctgagaactgaggacacggctgtgtattactgtgcgaaagtttactatggttcgggtatttattataaaaacaggaactactacggtatggacgtctggggccaagggaccacggtcaccgtctcctcaggtggtggtggttctggcggcggcggctccggtggtggtggttcttcatatgagctgactcagccaccctcagtgtcagtggccctgggacagacggccaggattacctgtgggggaaacaacattggaagtcaaaatgtgcactggtaccagcagaagccaggccaggcccctgtgctggtcatctatagggatagcaaccggccctctgggatccctgaccgattctctggctccaagtcggggaacacggccaccctgaccatcagcagagcccaagccggggatgaggctgactattactgtcaggtgtgggacagcagcactgtggttttcggcggagggaccaagctgaccgtccta

SEQ ID NO: 1164 - DNA, 747 bp, synthetic construct
  misc_feature 1..747: note = Synthetic Peptide
  source 1..747: mol_type = other DNA
caggtgcagctggtggagtctgggggaggcgtggtccagcctgggaggtccctgagactctcctgtgcagcctctggattcaacttcagtaactatggcatgcactgggtccgccaggctccaggcaaggggctggaatgggtggcagttatatcatatgatggaagtaataaatattatgcagactccgtgaagggccgattcaccatctccagagacaattccaagaacacgctgtatctacaaatgaacagcctgagagctgaggacacggctgtgtatttctgtgcgagagtttactatggttcggggatttattataaaaagagatactactacggtatggacgtctggggccaagggaccacggtcaccgtctcctcaggtggtggtggttctggcggcggcggctccggtggtggtggttcttcatatgagctgactcagccaccctcagtgtcagtggccctgggacagacggccaggattacctgtgggggacacaacattggaagtaaaggtgtgcactggtaccagcagaagccaggccaggcccctgtgctggtcatctataggaatagcaaccggccctctgggatccctgagcgattctctggctccaactcggggaacacggccaccctgaccatcaccagagcccaagccggggatgaggctgactattactgtcaggtgtgggacagcagcactgtggttttcggcggagggaccaagctgaccgtccta

SEQ ID NO: 1165 - DNA, 747 bp, synthetic construct
  misc_feature 1..747: note = Synthetic Peptide
  source 1..747: mol_type = other DNA
caggtgcagctggtggagtccgggggaggcgtggtccagcctgggaggtccctgagactctcctgtgcaccctctggattcaacttcagtaactatggcatgcactgggtccgccaggctccaggcaaggggctggagtgggtggcagttatatcatatgatggaagtaataaatattatgcagactccgtgaagggccgattcaccatctccagagacaattccaaaaacacgctgtttctgcaaatgaacagcctgagagctgaggacacggctgtgtatttctgtgcgagagtttactatggttcggggagttattataaaaagagatactactacggtatggacgtctggggccaagggaccacggtcaccgtctcctcaggtggtggtggttctggcggcggcggctccggtggtggtggttcttcatatgagctgactcagccaccctcagtgtcagtggccctgggacagacggccaggattacctgtgggggaaacaacattggaagtcaaaatgtgcactggtaccagcagaagccaggccaggcccctgtgctggtcatctatagggatagcaaccggccctctgggatccctgagcgattctctggctccaagtcggggaacacggccaccctgaccatcagcagagcccaagccggggatgaggctgactattactgtcaggtgtgggacagcagcactgtggttttcggcggaggcacccagctgaccgtccta

SEQ ID NO: 1166 - DNA, 747 bp, synthetic construct
  misc_feature 1..747: note = Synthetic Peptide
  source 1..747: mol_type = other DNA
caggtgcagctggtggagtccgggggaggcgtggtccagcctgggaggtccctgagactctcctgtgcagcgtctggattcaccttcagtagctctggcatgcactgggtccgccaggctccaggcaaggggctggagtgggtggcagttatatcatatgatggaactaataaatactatgcggactccgtgaagggccgattcaccatctccagagacaattccaagaacacgctgtatctgcaaatgaacagcctgagagctgaggacacggctgtgtattactgtgcgaaagtttactatggttcgggtatttattataaaaacaggtactactacggtatggacgtctggggccaagggaccacggtcaccgtctcctcaggtggtggtggttctggcggcggcggctccggtggtggtggttcttcatatgagctgactcagccaccctcagtgtcagtggccctgggacagacggccaggattacctgtgggggacacaacattggaagtaaaggtgtgcactggtaccagcagaagccaggccaggcccctgtgctggtcatctatagaaatagcaaccggccctctgggatccctgagcgattctctggctccaactcggggaacacggccaccctgaccatcagcagagcccaagccggggatgaggctgactattactgtcaggtgtgggacagcagcactgtggttttcggcggaggcacccagctgaccgtccta

SEQ ID NO: 1167 - DNA, 747 bp, synthetic construct
  misc_feature 1..747: note = Synthetic Peptide
  source 1..747: mol_type = other DNA
caggtgcagctggtggagtctgggggaggcgtggtccagcctgggaggtccctgagactctcctgtgcagtctctggattcaacttcagtaactatggcatgcactgggtccgccaggttccaggcagggggctagattgggtggcagttatatcaaatgatggaagtaataaatactatgcagactccgtgaagggccgattcaccatttccagagacaattccaagaacacactgtatctgcaaatggacagcctgagaactgaggacacggctgtgtattactgtgcgaaagtttactatggttcgggtatttattataaaaagagatactactacggtatggacgtctggggccaagggaccacggtcaccgtctcctcaggtggtggtggttctggcggcggcggctccggtggtggtggttcttcatatgagctgactcagccaccctcagtgtcagtggccctgggacagacggccaggattacctgtgggggacacaacattggaagtcaaaatgtgcactggtaccagcagaagccaggccaggcccctgtgctggtcatctatagggatagcaaccggccctctgggatccctgagcgattctctggctccaagtcggggaacacggccaccctgaccatcagcagagcccaagccggggatgaggctgactattactgtcaggtgtgggacagcagcactgtggttttcggcggaggcacccagctgaccgtccta

SEQ ID NO: 1168 - DNA, 747 bp, synthetic construct
  misc_feature 1..747: note = Synthetic Peptide
  source 1..747: mol_type = other DNA
caggtgcagctggtggagtccgggggaggcgtggtccagcctgggaggtccctgagactctcctgtgcagcctctggattcaacttcagtaactatggcatgcactgggtccgccaggctccaggcaaggggctggaatgggtggcagttatatcatatgatggaagtaataaatattatgcagactccgtgaagggccgattcaccatctccagagacaattccaagaacacgctgtatctacaaatgaacagcctgagagctgaggacacggctgtgtatttctgtgcgagagtttactatggttcggggatttattataaaaagagatactactacgggatggacgtctggggccaagggaccacggtcaccgtctcctcaggtggtggtggttctggcggcggcggctccggtggtggtggttcttcatatgagctgactcagccaccctcggtgtcagtggccccaggacagacggccaggattacctgtgggggaaacaacattggaagtaaaaatgtgcactggtaccagcagaaggcaggccaggcccctgtgcaggtcatctatagaaatagcaaccggccctctgggatccctgcgcgattctctggctccaactcggggaacacggccaccctgaccatcagcagagcccaggccggggatgaggctgactattactgtcaggtgtgggacagcagcactgtggttttcggcggtgggaccaagctgaccgtccta

SEQ ID NO: 1169 - DNA, 744 bp, synthetic construct
  misc_feature 1..744: note = Synthetic Peptide
  source 1..744: mol_type = other DNA
caggtgcagctggtggagtccgggggaggcgtggtccagcctgggaggtccctgagactctcctgtgcagcctctggattcaccttcagtagctatggcatgcactgggtccgccaggctccaggcaaggggctggagtgggtggcagttatatcatatgatggaagtaataaatactatgcagactccgtgaagggccgattcaccatctccagagacaattccaagaacacgctgtatctgcaaatgaacagcctgagaggtgaggacacggcggtgtattactgtgcgagagtttactatggttcggggagttattataaaaaccgctactactacggtatggacgtctggggccaagggaccacggtcaccgtctcctcaggtggtggtggttctggcggcggcggctccggtggtggtggttcttcatatgagctgactcagccaccctcggtgtcagtggccccaggacagacggccaggattccctgtgggggaaacaacattggaagtaaaaatgtgcactggtaccagcagaagccaggccaggcccctgtactggtcatctatagggatatcaaccggccctctgggatccctgagcgattctctggctccaactcggggaacacggccaccctgaccatcagcagagcccaagccggggatgaggctgactattactgtcaggtgtgggacagcagcgtggtattcggcggagggaccaagctgaccgtcctc

SEQ ID NO: 1170 - DNA, 747 bp, synthetic construct
  misc_feature 1..747: note = Synthetic Peptide
  source 1..747: mol_type = other DNA
caggtgcagctggtggagtccgggggaggcgtggtccagcctgggaggtccctgagactctcctgtgcagcctctggattcaacttcagtaactatggcatgcactgggtccgccaggctccaggcaaggggctggaatgggtggcagttatatcatatgatggaagtaataaatattatgcagactccgtgaagggccgattcaccatctccagagacaattccaagaacacgctgtatctacaaatgaacagcctgagagctgaggacacggctgtgtatttctgtgcgagagtttactatggttcggggatttattataaaaagagatactactacggtatggacgtctggggccaagggaccacggtcaccgtctcctcaggtggtggtggttctggcggcggcggctccggtggtggtggttcttcatatgagctgactcagccaccctcagtgtcagtggccctgggacagacggccaggcttacctgtgagggaaacaacattggaagtaaaaatgtgcactggtaccagcagaagccaggccaggcccctgtgctggtcatctataggaatagcaaccggccctctgggatccctgagcgattctctggctccaactcggggaacacggccaccctgactattagcagagtccaagccggggatgaggctgactattactgtcaggcgtgggacagcagcactgtggtattcggcggaggcacccagctgaccgtccta

SEQ ID NO: 1171 - DNA, 753 bp, synthetic construct
  misc_feature 1..753: note = Synthetic Peptide
  source 1..753: mol_type = other DNA
caggtgcagctggtggagtccgggggaggcctggtcaagcctggggggtccctgagactctcctgtgcagtctctggattcaacttcagtaacaatggcatgcactgggtccgccaggctccaggcaaggggctggagtgggtggcagtcatatcgtatgatggaagtaataaatactatacagactccgtgaagggccgattcaccatctccagagacaattccaagaacacgctgtatctgcaaatgaacagcctgagaactgaggacacggctgtgtattactgtgcgaaagtttactatggttcgggtatttattataaaaagagatactactacggtatggacgtctggggccaagggaccacggtcaccgtctcctcaggtggtggtggttctggcggcggcggctccggtggtggtggttcttcatatgagctgactcagccactctcagtgtcagaggccctgggacagacggccaggattacctgtgggggaaacaacattggaagtaaaaatgtgcactggtaccagcagaagccaggccaggcccctgtactggtcatctatagggatagcaaccggccctcagggatccctgagcgattctctggctccaactctgggaacgcggccaccctgaccatcagtagggtcgaagccggggatgaggccgactattactgtcaggtgtgggatagtagcagtgatcatgtggtattcggcggaggcacccagctgaccgtccta

SEQ ID NO: 1172 - DNA, 747 bp, synthetic construct
  misc_feature 1..747: note = Synthetic Peptide
  source 1..747: mol_type = other DNA
caggtgcagctggtggagtctgggggaggcgtggtccagcctgggaggtccctgagactctcctgtgcagcctctggattcaacttcagtaactatggcatgcactgggtccgccaggctccaggcaaggggctggaatgggtggcagttatatcatatgatggaagtaataaatattatgcagactccgtgaagggccgattcaccatctccagagacaattccaagaacacgctgtatctacaaatgaacagcctgagagctgaggacacggctgtgtatttctgtgcgagagtttactatggttcggggatttattataaaaagagatactactacggtatggacgtctggggccaagggaccacggtcaccgtctcctcaggtggtggtggttctggcggcggcggctccggtggtggtggttcttcatatgagctgactcagccaccctcggtgtcagtggccccaggacagacggccaggattacctgtgggggaaacaacattggaagtaaaaatgtgcactggtaccagcagaagccaggccaggcccctgtactggtcatctatagaaatagcaaccggccctctgggatccctgagcgattctctggctccaactctgggaacacagccactctgaccatcagcgggacccaggctatggatgaggctgactattactgtcaggcgtgggacagcagcaatgtggtattcggcggaggcacccagctgaccgtccta

SEQ ID NO: 1173 - DNA, 747 bp, synthetic construct
  misc_feature 1..747: note = Synthetic Peptide
  source 1..747: mol_type = other DNA
caggtgcagctggtggagtccgggggaggcgtggtccagcctgggaggtccctgagactctcctgtgtagtctctggattcaacttcagtaggaatggcatgcactgggtccgccaggttccaggcagggggctagattgggtggcagttatatcaaatgatggaagtaataaatactatgcagactccgtgaagggccgattcaccatctccagagacaattccaagaacacgctgtatctgcaaatgaacagcctgagagctgaggacacggctgtgtattactgtgcgaaagtttactatggttcggggatttattataaaaataactactattacggtatggacgtctggggccaagggaccacggtcaccgtctcctcaggtggtggtggttctggcggcggcggctccggtggtggtggttcttcatatgagctgactcagccactctcagtgtcagtggccctgggacagacggccaggattacctgtgggggaaacaacattggaagtcaaaatgtgcactggtaccagcagaagccaggccaggcccctgtgctggtcatctatagggatagcaaccggccctctgggatccctgaccgattctctggctccaagtcggggaacacggccaccctgaccatcagcagagcccaagccggggatgaggctgactattactgtcaggtgtgggacagcagcactgtggttttcggcggaggcacccagctgaccgtccta

SEQ ID NO: 1174 - DNA, 747 bp, synthetic construct
  misc_feature 1..747: note = Synthetic Peptide
  source 1..747: mol_type = other DNA
caggtgcagctggtggagtctgggggaggcgtggtccagcctgggaggtccctgagactctcctgtgtagtctctggattcaacttcagtaggaatggcatgcactgggtccgccaggttccaggcagggggctagattgggtggcagttatatcaaatgatggaagtaataaatactatgcagactccgtgaagggccgattcaccatctccagagacaattccaagaacacgctgtatctgcaaatgaacagcctgagagctgaggacacggctgtgtattactgtgcgaaagtttactatggttcggggatttattataaaaaccgctattactacggtatggacgtctggggccaagggaccacggtcaccgtctcctcaggtggtggtggttctggcggcggcggctccggtggtggtggttcttcatatgagctgactcagccaccctcggtgtcagtggccccaggacagacggccaggattacctgtgggggaaacaacattggaagtaaaaatgtgcactggtaccagcagaagccaggccaggcccctgtgctggtcatctatagggatagcaaccggccctctgggatccctgagcgattctctggctccaagtcggggaccacggccaccctgaccatcagcagagcccaagccggggatgaggctgagtattactgtcaggtgtgggacagcagcactgtggttttcggcggagggaccgagctgaccgtccta

SEQ ID NO: 1175 - DNA, 747 bp, synthetic construct
  misc_feature 1..747: note = Synthetic Peptide
  source 1..747: mol_type = other DNA
caggtgcagctggtggagtccgggggaggcgtggtccagcctgggaggtccctgagactctcctgtgcagcctctggattcaacttcagtaactatggcatgcactgggtccgccaggctccaggcaaggggctggaatgggtggcagttatatcatatgatggaagtaataaatattatgcagactccgtgaagggccgattcaccatctccagagacaattccaagaacacgctgtatctacaaatgaacagcctgagagctgaggacacggctgtgtatttctgtgcgagagtttactatggttcggggatttattataaaaagagatactactacggtatggacgtctggggccaagggaccacggtcaccgtctcctcaggtggtggtggttctggcggcggcggctccggtggtggtggttcttcatatgagctgacacagccactctcagtgtcagtggccctgggacagacggccaggattacctgtgggggaaacaacattggaagtaaaaatgtgcactggtaccagcagaagccaggccaggcccctgtgctggccatctataggaatagcaaccggccctctgggatccctgagcgattcactggctccaactcggggaacacggccaccctgaccatcagcagagcccaagccggggatgagtctgactattactgtcaaatatgggacagcagcactgtggtattcggcggaggcaccaagctgaccgtccta

SEQ ID NO: 1176 - DNA, 747 bp, synthetic construct
  misc_feature 1..747: note = Synthetic Peptide
  source 1..747: mol_type = other DNA
caggtgcagctggtggagtccgggggaggcgtggtccagcctgggaggtccctgagactctcctgtgcagcctctggattcaacttcagtaggaatggcatgcactgggtccgccaggttccaggcagggggctagattgggtggcagttatatcaaatgatggaagtaataaatactatgcggactccgtgaagggccgattcaccatctccagagacaattccaagaacacgctgtatctgcaaatgaacagcctgagagctgaggacacggctgtgtattactgtgcgaaagtttactatggttcgggtatttattataaaaagaactactactacggtatggacgtctggggccaagggaccacggtcaccgtctcctcaggtggtggtggttctggcggcggcggctccggtggtggtggttcttcatatgagctgactcagccaccctcggtgtcagtggccctgggacagacggccaggatttcctgtgggggaaacaacattggaagtaaaaatgtgcactggtaccagcagaagccaggccaggcccctgtgctggtcatctatagggatagcaaccggccctctgggatccctgagcgattctctggctccaagtcggggaccacggccaccctgaccatcagcagagcccaagccggggatgaggctgagtattactgtcaggtgtgggacagcagcactgtggttttcggcggaggcacccagctgaccgtccta

SEQ ID NO: 1177 - DNA, 747 bp, synthetic construct
  misc_feature 1..747: note = Synthetic Peptide
  source 1..747: mol_type = other DNA
caggtgcagctggtggagtccgggggaggcgtggtccagcctgggaggtccctgagactctcctgtgcagtctctggattcaacttcagtaacaatggcatgcactgggtccgccaggctccaggcaaggggctggagtgggtggcagtcatatcgtatgatggaagtaataaatactatacagactccgtgaagggccgattcaccatctccagagacaattccaagaacacgctgtatctgcaaatgaacagcctgagaactgaggacacggctgtgtattactgtgcgaaagtttactatggttcgggtatttattataaaaagagatactactacggtatggacgtctggggccaagggaccacggtcaccgtctcctcaggtggtggtggttctggcggcggcggctccggtggtggtggttcttcatatgagctgactcagccaccctcagtgtcagtggccctgggacagacggccaggattacctgtgagggaaacaacattggaagtcaaaatgtgcactggtaccagcagaagccaggccaggcccctgtgctggtcatgtatagggatagcaaccggccctctgggatccctgaacgattctctggctccaagtcggggaacacggccaccctggccatcagcagagcccaagccggggatgagtctgactattactgtcaggtgtgggacggcagtgccgtggtattcggcggagggaccaagctgaccgtccta

SEQ ID NO: 1178 - DNA, 747 bp, synthetic construct
  misc_feature 1..747: note = Synthetic Peptide
  source 1..747: mol_type = other DNA
caggtgcagctggtggagtctgggggaggcgtggtccagcctgggaggtccctgagactctcctgtgcagcgtctggattcaccttcagtagctatggcatgcactgggtccgccaggctccaggcaaggggctggagtgggtggcagttatatcatatgatggaagtaataaatattatgcagactccgtgaagggccgattcaccatctccagagacaattccaagaacacgctgtatctacaaatgaacagcctgagagctgaggacacggctgtgtatttctgtgcgagagtttactatggttcggggatttattataaaaagagatactactacggtatggacgtctggggccaagggaccacggtcaccgtctcctcaggtggtggtggttctggcggcggcggctccggtggtggtggttcttcatatgagctgactcagccactctcagtgtcagtggccctgggacagacggccaggattacctgtgagggaaacaacattggaagtcaaaatgtgcactggtaccagcagaagccaggccaggcccctgtgctggtcatgtatagggatagcaaccggccctctgggatccctgaacgattctctggctccaagtcggggaacacggccaccctggccatcagcagagcccaagccggggatgagtctgactattactgtcaggtgtgggacggcagtgccgtggtattcggcggaggcacccagctgaccgtccta

SEQ ID NO: 1179 - DNA, 747 bp, synthetic construct
  misc_feature 1..747: note = Synthetic Peptide
  source 1..747: mol_type = other DNA
caggtgcagctggtggagtccgggggaggcgtggtccagcctgggaggtccctgagactctcctgtgcagcctctggattcaccttcagtaactatggctttcactgggtccgccagactccaggcaaggggctggagtgggtggcagttatatcatatgatggaagtaatagatactatgcagactccgtgaagggccgattcaccatctccagagacaattccaagaacacgctgtatctccaaatgaacagcctgagaggtgaggacacggcgctatattactgtgcgagagtttactatggttcggggacttattataaaaaccgctactactacggtatggacgtctggggccaagggaccacggtcaccgtctcctcaggtggtggtggttctggcggcggcggctccggtggtggtggttcttcatatgagctgactcagccaccctcagtgtcagtggccctgggacagacggccaggattacctgtgggggacacaacattggaagtaaaggtgtgcactggtaccagcagaagccaggccaggcccctgtactggtcatctatagaaatagcaaccggccctctgggatccctgagcgattctctggctccaactctgggaacacagccactctgaccatcagcgggacccaggctatggatgaggctgactattactgtcaggcgtgggacagcggcactgtggtattcggcggaggcacccagctgaccgtccta

SEQ ID NO: 1180 - DNA, 753 bp, synthetic construct
  misc_feature 1..753: note = Synthetic Peptide
  source 1..753: mol_type = other DNA
caggtgcagctggtggagtccgggggaggcgtggtccagcctgggaggtccctgagactctcctgtgcagcctctggattcaccttcagtaactatggctttcactgggtccgccagactccaggcaaggggctggagtgggtggcagttatatcatatgatggaagtaatagatactatgcagactccgtgaagggccgattcaccatctccagagacaattccaagaacacgctgtatctccaaatgaacagcctgagaggtgaggacacggcgctatattactgtgcgagagtttactatggttcggggacttattataaaaaccgctactactacggtatggacgtctggggccaagggaccacggtcaccgtctcctcaggtggtggtggttctggcggcggcggctccggtggtggtggttcttcatatgagctgactcagccaccctcagtgtcagtggccctgggacagacggccaggattacctgtggggcaaacaacattggaagtaaaaatgttcactggtaccagcagaagccaggccagccccctgtgctggtcatctatagagatttcaaccggccctctgggatccctgagcgattctctgcctccaactcggggaacacggccaccctgaccatcagcagaggccaagccggggatgaggctgactattactgtcaggtgtgggacagcagcactgggaatgtggtattcggcggagggaccaagctgaccgtccta

SEQ ID NO: 1181 - DNA, 747 bp, synthetic construct
  misc_feature 1..747: note = Synthetic Peptide
  source 1..747: mol_type = other DNA
caggtgcagctggtggagtctgggggaggcgtggtccagcctgggaggtccctgagactctcctgtgcagcctctggattcatcttcagtaactatggctttcactgggtccgccagactccaggcaaggggctggagtgggtggcagttatatcatatgatggaagtaataaatactatgcagactccgtgaagggccgattcaccatctccagagacaattccaagaacacgctgtatctgcaaatgaacagcctgagaggtgaggacacggcggtgtattactgtgcgagagtttactatggttcggggagttattataaaaaccgctactactacggtatggacgtctggggccaagggaccacggtcaccgtctcctcaggtggtggtggttctggcggcggcggctccggtggtggtggttcttcatatgagctgactcagccaccctcggtgtcagtggccccaggacagacggccaggattacctgtgggggaaacaacattggaagtaaaaatgtgcactggtaccagcagaagccaggccaggcccctgtgctggtcatctatagggatagcaaccggccctctgggatccctgagcgattctctggctccaagtcggggaccacggccaccctgaccatcagcagagcccaagccggggatgaggctgactattactgtcaggtgtgggacagcagcactgtggttttcggcggagggaccgagctgaccgtccta

SEQ ID NO: 1182 - DNA, 753 bp, synthetic construct
  misc_feature 1..753: note = Synthetic Peptide
  source 1..753: mol_type = other DNA
caggtgcagctggtggagtctgggggaggcgtggtccagcctgggaggtccctgagactctcctgtgcagcctctggattcaacttcagtaactatggcatgcactgggtccgccaggctccaggcaaggggctggaatgggtggcagttatatcatatgatggaagtaataaatattatgcagactccgtgaagggccgattcaccatctccagagacaattccaagaacacgctgtatctacaaatgaacagcctgagagctgaggacacggctgtgtatttctgtgcgagagtttactatggttcggggatttattataaaaagagatactactacggtatggacgtctggggccaagggaccacggtcaccgtctcctcaggtggtggtggttctggcggcggcggctccggtggtggtggttcttcatatgagctgactcagtcatcctcggtgtcagtggccccaggacagacggccaggattacctgtgggggaaacaacattggaagtaaaaatgtgcactggtaccagcagaagccaggccaggcccctgtgttggtcatctatagggatagcaaccggccctctgggatccctgagcgattctctggctccaagtcggggaccacggccaccctgaccatcagcagggtcgaagccggggatgaggccgactattactgtcaggtgtgggatagtagtagtgctcatgtgatattcggcggagggaccaagctgaccgtccta

SEQ ID NO: 1183 - DNA, 747 bp, synthetic construct
  misc_feature 1..747: note = Synthetic Peptide
  source 1..747: mol_type = other DNA
caggtgcagctggtggagtccgggggaggcgtggtccagcctgggaggtccctgagactctcctgtggagcctctggattcaccttcagtggctatggcatgcactgggtccgccaggctccaggcaaggggctggagtgggtggcagttatatcatatgatggaagtaataaatactatgcagactccgtgaagggccgattcaccatctcaagagacaattccaagaacacgctgtatctgcaaatgaacagcctgagaggtgaggacacggcggtgtattactgtgcgagagtttattatggttcggggatttattataaaaaccgctactactacggtatggacgtctggggccaagggaccacggtcaccgtctcctcaggtggtggtggttctggcggcggcggctccggtggtggtggttcttcatatgagctgactcagccaccctcagggtcagtggccctgggacagacggccaggatcacctgtgggggaaacaaccttggaagtaaaaatgtgcactggtaccaacagaagccaggccaggcccctgtgctggtcatctatagaaatagcaaccggccctctgggatccctgagcgattctctggctccaactcggggaacacggccaccctgaccatcagcagagcccaggccggggatgaggctgactattactgtcaggtgtgggacagcagcactgtggtattcggcggtgggaccaagctgaccgtccta

SEQ ID NO: 1184 - DNA, 747 bp, synthetic construct
  misc_feature 1..747: note = Synthetic Peptide
  source 1..747: mol_type = other DNA
caggtgcagctggtggagtctgggggaggcctggtcaagcctggggggtccctgagactctcctgtgcagcctctggattcaccttcagtaacaatggcatgcactgggtccgccaggctccaggcaaggggctggagtgggtggcagtcatatcgtatgatggaagtaataaatactatgcggactccgtgaagggccgattcaccatctccagagacaattccaagaacacgctgtatctgcaaatgaacagcctgagagctgaggacacggctgtgtattactgtgcgaaagtttattatggttcggggatttattataaaaacaggtattactacgggatggacgtctggggccaagggaccacggtcaccgtctcctcaggtggtggtggttctggcggcggcggctccggtggtggtggttcttcatatgagctgactcagccaccctcagtgtcagtggccctgggacagacggccaggattacctgtgggggaaacagaattggaagtaaaaatgtgcactggtaccagcagaagccaggccaggcccctgtgttggtcatctatagggatagcaaccggccctctgggatccctgagcgattctctggctccaagtcggggaccacggccaccctgaccatcagcagagcccaagccggggatgaggctgagtattactgtcaggtgtgggacagcagcactgtggttttcggcggagggaccaagctgaccgtccta

SEQ ID NO: 1185 - DNA, 747 bp, synthetic construct
  misc_feature 1..747: note = Synthetic Peptide
  source 1..747: mol_type = other DNA
caggtgcagctggtggagtctgggggaggcgtggtccagcctgggaggtccctgagactctcctgtgcagcctctggattcaccttcagtaactatggctttcactgggtccgccagactccaggcaaggggctggagtgggtggcagttatatcatatgatggaagtaatagatactatgcagactccgtgaagggccgattcaccatctccagagacaattccaagaacacgctgtatctccaaatgaacagcctgagaggtgaggacacggcgctatattactgtgcgagagtttactatggttcggggacttattataaaaaccgctactactacggtatggacgtctggggccaagggaccacggtcaccgtctcctcaggtggtggtggttctggcggcggcggctccggtggtggtggttcttcatatgagctgacacagctaccttcagtgtcagtggccctgggacagacggccaggattacctgtgggggacacaacattggaagtaaaggtgtgcactggtaccagcagaagccaggccaggcccctgtgctggtcatctatagaaatagcaaccggccctctgggatccctgagcgattctctggctccaactcggggaacacggccaccctgaccatcagcagagcccaagccggggatgaggctgactattactgtcaggtgtgggacagcagcactgtggttttcggcggagggaccgagctgaccgtccta

SEQ ID NO: 1186 - DNA, 747 bp, synthetic construct
  misc_feature 1..747: note = Synthetic Peptide
  source 1..747: mol_type = other DNA
caggtgcagctggtggagtctgggggaggcgtggtccagcctgggaggtccctgagactctcctgtgcagcctctggattcaacttcagtaactatggcatgcactgggtccgccaggctccaggcaaggggctggaatgggtggcagttatatcatatgatggaagtaataaatattatgcagactccgtgaagggccgattcaccatctccagagacaattccaagaacacgctgtatctacaaatgaacagcctgagagctgaggacacggctgtgtatttctgtgcgagagtttactatggttcggggatttattataaaaaccgctattactacggtatggacgtctggggccaagggaccacggtcaccgtctcctcaggtggtggtggttctggcggcggcggctccggtggtggtggttcttcatatgagctgactcagccaccctcagtgtcagtggccctgggacagacggccaggattacctgtgggggacacaacattggaagtaaaggtgtgcactggtaccagcagaagccaggccaggcccctgtgctggtcatctatagaaatagcaaccggccctctgggatccctgagcgattctctggctccaactcggggaacacggccaccctgaccatcagcagagcccaagccggggatgaggctgactattactgtcaggtgtgggacagtagtactgtggttttcggcggaggcacccagctgaccgtccta

SEQ ID NO: 1187 - DNA, 747 bp, synthetic construct
  misc_feature 1..747: note = Synthetic Peptide
  source 1..747: mol_type = other DNA
caggtgcagctggtggagtctgggggagacttggtacagcctgggaggtccctgagactctcctgtgcagcgtctggattcaccttcagtaacaatggcatgcactgggtccgccaggctccaggcaagggactggagtgggtggcagttatttcaaatgatggcagtaataaatattatgcagattccgtgaggggccgattcaccatctccagagacaattccaagaacacgctgtatctgcaaatgaacagcctgagagctgaggacacggctgtgtattattgtgcgaaagtttactatggttcgggtatttattataaaaacaggtactactacgggatggacgtctggggccaagggaccacggtcaccgtctcctcaggtggtggtggttctggcggcggcggctccggtggtggtggttcttcatatgagctgactcagccactctcagtgtcagtggccctgggacagacggccaggattacctgtgggggaaacaacattggaagtaaaaatgtgcactggtaccagcagaagccaggccaggcccctgtgctggtcatctataggaatagcaaccggccctctgggatccctgagcgattctctggctccaactcggggaacacggccaccctgactcttagcagagtccaagccggggatgaggctgactattactgtcaggtgtgggacagcagcactgtggttttcggcggagggaccaagctgaccgtccta

SEQ ID NO: 1188 - DNA, 747 bp, synthetic construct
  misc_feature 1..747: note = Synthetic Peptide
  source 1..747: mol_type = other DNA
caggtgcagctggtggagtccgggggaggcgtggtccagcctgggaggtccctgagactctcctgtgcagtctctggattcaacttcagtaacaatggcatgcactgggtccgccaggctccaggcaagggactggagtgggtggcagttatttcaaatgatggcagtaataaatattatgcagattccgtgaggggccgattcaccatctccagagacaattccaagaacacactgtatctgcaaatggacagcctgagaactgaggacacggctgtgtattactgtgcgaaagtttactatggttcgggtatttattataaaaacaggtactactacggtatggacgtctggggccaagggaccacggtcaccgtctcctcaggtggtggtggttctggcggcggcggctccggtggtggtggttcttcatatgagctgactcagccaccctcagtgtcagtggccctgggacagacggccaggcttacctgtgagggaaacaacattggaagtaaaaatgtgcactggtaccagcagaagccaggccaggcccctgtgttggtcatctatagggatagcaaccggccctctgggatccctgagcgcttctctggctccaagtcggggaacacggccaccctggccatcagcagagcccaagccggggatgagtctgactattactgtcaggtgtgggacagcagtgccgtggtattcggcggaggcaccaagctgaccgtccta

SEQ ID NO: 1189 - DNA, 747 bp, synthetic construct
  misc_feature 1..747: note = Synthetic Peptide
  source 1..747: mol_type = other DNA
caggtgcagctggtggagtccgggggaggcgtggtccagcctgggaggtccctgagactctcctgtgcagcctctggattcaccttcagtagctctggcatgcactgggtccgccaggctccaggcaaggggctggagtgggtggcagttatatcaaatgatggaagtaataaatactatgcagactccgtgaagggccgattcaccatctccagagacaattccaagaacacgctgtatctgcaaatgaacagcctgagagctgaggacacggctgtgtattactgtgcgaaagtttactatggttcggggatttattataaaaataactactattacggtatggacgtctggggccaagggaccacggtcaccgtctcctcaggtggtggtggttctggcggcggcggctccggtggtggtggttcttcatatgagctgactcagccaccctcagtgtcagtggccctgggacagacggccaggattacctgtgggggaaacaacattggaagtaaaaatgtgcactggtaccagcagaagccaggccaggcccctgtgctggccatctataggaatagcaaccggccctctgggatccctgagcgattcactggctccaactcggggaacacggccaccctgaccatcagcgggacccaggctatggatgaggctgactattactgtcaggcgtgggacagcagcactgtggtattcggcggagggaccaagctgaccgtccta

SEQ ID NO: 1190 - DNA, 747 bp, synthetic construct
  misc_feature 1..747: note = Synthetic Peptide
  source 1..747: mol_type = other DNA
caggtgcagctggtggagtctgggggaggcgtggtccagcctgggaggtccctgagactctcctgtgcagcctctggattcaacttcagtaactatggcatgcactgggtccgccaggctccaggcaaggggctggaatgggtggcagttatatcatatgatggaagtaataaatattatgcagactccgtgaagggccgattcaccatctccagagacaattccaagaacacgctgtatctacaaatgaacagcctgagagctgaggacacggctgtgtatttctgtgcgagagtttactatggttcggggatttattataaaaagagatactactacggtatggacgtctggggccaagggaccacggtcaccgtctcctcaggtggtggtggttctggcggcggcggctccggtggtggtggttcttcatatgagctgactcagccaccctcagtgtcagtggccctgggacagacggccaggattacctgtgggggaaacaacattggaagtcaaaatgtgcactggtaccagcagaagccaggccaggcccctgtgctggtcatctatagggatagcaaccggccctctgggatccctgagcgcttctctggctccaagtcggggaacacggccaccctggccatcagcagagcccaagccggggatgagtctgactattactgtcaggtgtgggacagcagtgccgtggtattcggcggaggcacccagctgaccgtccta

SEQ ID NO: 1191 - DNA, 747 bp, synthetic construct
  misc_feature 1..747: note = Synthetic Peptide
  source 1..747: mol_type = other DNA
caggtgcagctggtggagtccgggggaggcgtggtccagcctgggaggtccctgagactctcctgtgcagcctctggattcaccctcagtagctctggcatgcactgggtccgccaggctccaggcaaggggctggagtgggtggcagttatatcaaatgatggaagtaataaatactatgcggactccgtgaagggccggttcaccatctccagagacgattccaagaacacactgtatctgcaaatggacagcctgagaactgaggacacggctgtgtattactgtgcgaaagtttactatggttcgggtatttattataaaaacaggtactactacgggatggacgtctggggccaagggaccacggtcaccgtctcctcaggtggtggtggttctggcggcggcggctccggtggtggtggttcttcatatgagctgactcagccaccctcagtgtcagtggccctgggacagacggccaggatttcctgtgggggaaacaacattggaagtaaaaatgtgcactggtaccagcagaagccaggccaggcccctgtgctggtcatgtatagggatagcaaccggccctcagggatccctgagcgattctctggctccaactctgggaacacagccactctgaccatcagcgggacccaggctatggatgaggctgactattactgtcaggcgtgggacagcggcactgtggtattcggcggagggaccaagctgaccgtccta

SEQ ID NO: 1192 - DNA, 747 bp, synthetic construct
  misc_feature 1..747: note = Synthetic Peptide
  source 1..747: mol_type = other DNA
caggtgcagctggtggagtctgggggaggcgtggtccagcctgggaggtccctgagactctcctgtgcagcctctggattcaacttcagtaactatggcatgcactgggtccgccaggctccaggcaaggggctggaatgggtggcagttatatcatatgatggaagtaataaatattatgcagactccgtgaagggccgattcaccatctccagagacaattccaagaacacgctgtatctacaaatgaacagcctgagagctgaggacacggctgtgtatttctgtgcgagagtttactatggttcggggatttattataaaaagagatactactacggtatggacgtctggggccaagggaccacggtcaccgtctcctcaggtggtggtggttctggcggcggcggctccggtggtggtggttcttcatatgagctgactcagccaccctcagtgtcagtggccctgggacagacggccagaattacctgtgggggaaacaacattggaggtaaaaatgtgcactggtaccagcagaagccaggccaggcccctgtgctggtcatctatagggatagcaaccggccctctgggatccctgagcgattctctggctccaagtcggggaacacggccaccctgaccatcagcagagcccaagccggggatgagtctgactattactgtcaggtgtgggacagcagcactgtggtattcggcggaggcacccagctgaccgtccta

SEQ ID NO: 1193 - DNA, 747 bp, synthetic construct
  misc_feature 1..747: note = Synthetic Peptide
  source 1..747: mol_type = other DNA
caggtgcagctggtggagtctgggggaggcgtggtccagcctgggaggtccctgagactctcctgtgtagtctctggattcaacttcagtaggaatggcatgcactgggtccgccaggttccaggcagggggctagattgggtggcagttatatcaaatgatggaagtaataaatactatgcagactccgtgaagggccgattcaccatctccagagacaattccaagaacacgctgtatctgcaaatgaacagcctgagagctgaggacacggctgtgtattactgtgcgaaagtttactatggttcggggatttattataaaaataactactattacggtatggacgtctggggccaagggaccacggtcaccgtctcctcaggtggtggtggttctggcggcggcggctccggtggtggtggttcttcatatgagctgactcagccactctcagtgtcagtggccctgggacagacggccaggattacctgtgggggaaacaacattggaagtaaaaatgtgcactggtaccagcagaagccaggccaggcccctgtgctggtcatctatagaaatagcaaccggccctctgggatccctgagcgattctctggctccaactcggggaacacggccaccctgaccatcagcagagcccaggccggggatgaggctgactattactgtcaggtgtgggacagcagcactgtggttttcggcggtgggaccaagctgaccgtccta

SEQ ID NO: 1194 - DNA, 747 bp, synthetic construct
  misc_feature 1..747: note = Synthetic Peptide
  source 1..747: mol_type = other DNA
caggtgcagctggtggagtccgggggaggcttggtcaagcctggagggtccctgagactctcctgtgcagcctctggattcaacttcagtaggaatggcatgcactgggtccgccaggttccaggcagggggctagattgggtggcagttatatcaaatgatggaagtaataaatactatgcagactccgtgaagggccgattcaccatctccagagacaattccaagaacacgctgtatctgcaaatgaacagcctgagagctgaggacacggctgtgtattactgtgcgaaagtttactatggttcggggatttattataaaaataactactactacggtatggacgtctggggccaagggaccacggtcaccgtctcctcaggtggtggtggttctggcggcggcggctccggtggtggtggttcttcatatgagctgactcagccaccctcagtgtcagtggccctgggacagacggccaggatttcctgtgggggaaacaacattgaaagtaaaaatgtgcactggtaccagcagaagccaggccaggcccctgtgttggtcatctatagggatagcaaccggccctctgggatccctgagcgattctctggctccaagtcggggaccacggccaccctgaccatcagcagagcccaagccggggatgaggctgagtattactgtcaggtgtgggacagcagcactgtggttttcggcggaggcacccagctgaccgtccta

SEQ ID NO: 1195 - DNA, 1404 bp, synthetic construct
  misc_feature 1..1404: note = Synthetic Peptide
  source 1..1404: mol_type = other DNA
atggacatgagggtgcccgctcagctcctggggctcctgctgctgtggctgagaggtgcgcgctgtgaggtgcagctggtggagtctgggggaggcttggtaaagcctggggggtccctgagactctcctgtgcagcctctggatttactttcagtaacgcccggatgggctgggtccgccaggctccagggaaggggctggagtgggttggccgtattaaaagcaaaactgaaggtgggacaagagactacgctgcacccgtgaaaggcagattcaccatctcaagagatgattcaaaaaacacgctgtatctgcaaatgaacagcctgaaaaccgaggacacagccgtgtattattgtacctcgtatagtggggtctggggccaagggacaatggtcaccgtgtcttcagcctccaccaagggcccatcggtcttccccctggcaccctcctccaagagcacctctgggggcacagcggccctgggctgcctggtcaaggactacttccccgaaccggtgacggtgtcgtggaactcaggcgccctgaccagcggcgtgcacaccttcccggctgtcctacagtcctcaggactctactccctcagcagcgtggtgaccgtgccctccagcagcttgggcacccagacctacatctgcaacgtgaatcacaagcccagcaacaccaaggtggacaagaaagttgagcccaaatcttgtgacaaaactcacacatgcccaccgtgcccagcacctgaactcctggggggaccgtcagtcttcctcttccccccaaaacccaaggacaccctcatgatctcccggacccctgaggtcacatgcgtggtggtggacgtgagccacgaagaccctgaggtcaagttcaactggtacgtggacggcgtggaggtgcataatgccaagacaaagccgcgggaggagcagtacaacagcacgtaccgtgtggtcagcgtcctcaccgtcctgcaccaggactggctgaatggcaaggagtacaagtgcaaggtgtccaacaaagccctcccagcccccatcgagaaaaccatctccaaagccaaagggcagccccgagaaccacaggtgtacaccctgcccccatcccgggaggagatgaccaagaaccaggtcagcctgacctgcctggtcaaaggcttctatcccagcgacatcgccgtggagtgggagagcaatgggcagccggagaacaactacaagaccacgcctcccgtgctggactccgacggctccttcttcctctatagcaagctcaccgtggacaagagcaggtggcagcaggggaacgtcttctcatgctccgtgatgcatgaggctctgcacaaccactacacgcagaagagcctctccctgtctccgggcaaatag

SEQ ID NO: 1196 - DNA, 729 bp, synthetic construct
  misc_feature 1..729: note = Synthetic Peptide
  source 1..729: mol_type = other DNA
atggacatgagggtgcccgctcagctcctggggctcctgctgctgtggctgagaggtgcgcgctgtgacatcgtgatgacccagtctccagactccctggctgtgtctctgggcgagagggccaccatcaactgcaagtccagccagagtgttttatacagttccaacaatagaaactacttagcttggtaccatcagaaaccaggacagtctcctaagctgctcatttcctgggcatctacccgggaatccggggtccctgaccgattcagtggcagcgggtctgggacagatttcactctcaccatcaacagcctgcaggctgaagatgtggcagtttattactgtcaacaatattatagtattccgatcactttcggcggagggaccaaggtggagatcaaacgaacggtggctgcaccatctgtcttcatcttcccgccatctgatgagcagttgaaatctggaactgcctctgttgtgtgcctgctgaataacttctatcccagagaggccaaagtacagtggaaggtggataacgccctccaatcgggtaactcccaggagagtgtcacagagcaggacagcaaggacagcacctacagcctcagcagcaccctgacgctgagcaaagcagactacgagaaacacaaagtctacgcctgcgaagtcacccatcagggcctgagctcgcccgtcacaaagagcttcaacaggggagagtgttag

SEQ ID NO: 1197 - DNA, 1443 bp, synthetic construct
  misc_feature 1..1443: note = Synthetic Peptide
  source 1..1443: mol_type = other DNA
atggacatgagggtgcccgctcagctcctggggctcctgctgctgtggctgagaggtgcgcgctgtcaggtgcagctggtggagtccgggggaggcgtggtccagcctgggaggtccctgagactctcctgtgcagcctctggattcaccttcagtaactatggctttcactgggtccgccagactccaggcaaggggctggagtgggtggcagttatctcatatgatggaagtaatagatactatgcaagctccgtgaagggccgattcaccatctccagagacaattccaagaacacgctgtatctccaaatgaacagcctgagaggtgaggacacggcgctatattactgtgcgagagtttactatggttcggggacttattataaaaaccgctactactacggtatggacgtctggggccaagggaccacggtcaccgtgtcctcagcctccaccaagggcccatcggtcttccccctggcaccctcctccaagagcacctctgggggcacagcggccctgggctgcctggtcaaggactacttccccgaaccggtgacggtgtcgtggaactcaggcgccctgaccagcggcgtgcacaccttcccggctgtcctacagtcctcaggactctactccctcagcagcgtggtgaccgtgccctccagcagcttgggcacccagacctacatctgcaacgtgaatcacaagcccagcaacaccaaggtggacaagaaagttgagcccaaatcttgtgacaaaactcacacatgcccaccgtgcccagcacctgaactcctggggggaccgtcagtcttcctcttccccccaaaacccaaggacaccctcatgatctcccggacccctgaggtcacatgcgtggtggtggacgtgagccacgaagaccctgaggtcaagttcaactggtacgtggacggcgtggaggtgcataatgccaagacaaagccgcgggaggagcagtacaacagcacgtaccgtgtggtcagcgtcctcaccgtcctgcaccaggactggctgaatggcaaggagtacaagtgcaaggtgtccaacaaagccctcccagcccccatcgagaaaaccatctccaaagccaaagggcagccccgagaaccacaggtgtacaccctgcccccatcccgggaggagatgaccaagaaccaggtcagcctgacctgcctggtcaaaggcttctatcccagcgacatcgccgtggagtgggagagcaatgggcagccggagaacaactacaagaccacgcctcccgtgctggactccgacggctccttcttcctctatagcaagctcaccgtggacaagagcaggtggcagcaggggaacgtcttctcatgctccgtgatgcatgaggctctgcacaaccactacacgcagaagagcctctccctgtctccgggcaaatag

SEQ ID NO: 1198 - DNA, 696 bp, synthetic construct
  misc_feature 1..696: note = Synthetic Peptide
  source 1..696: mol_type = other DNA
atggcctgggctctgctgctcctcaccctcctcactcagggcacagggtcctgggcctcatatgagctgactcagccaccctcagtgtcagtggccctgggacagacggccaggattacctgtgggggacacaacattggaagtaaaggtgtgcactggtaccagcagaagccaggccaggcccctgtactggtcatctatagagccgccaaccggccctctgggatccctgagcgattctctggctccaactctgggaacacagccactctgaccatcagcgggacccaggctggcgatgaggctgactattactgtcaggcgttcgacgccggcactgtggtattcggcggaggcacccagctgaccgtcctaggtcagcccaaggctgcaccctcggtcactctgttcccgccctcctctgaggagcttcaagccaacaaggccacactggtgtgtctcatcagtgacttctacccgggagccgtgacagtggcctggaaggcagatagcagccccgtcaaggcgggagtggaaaccaccacaccctccaaacaaagcaacaacaagtacgcggccagcagctatctgagcctgacgcctgagcagtggaagtcccacagaagctacagctgccaggtcacgcatgaagggagcaccgtggagaagacagtggcccctacagaatgttcatag

SEQ ID NO: 1199 - DNA, 1443 bp, synthetic construct
  misc_feature 1..1443: note = Synthetic Peptide
  source 1..1443: mol_type = other DNA
atggacatgagggtgcccgctcagctcctggggctcctgctgctgtggctgagaggtgcgcgctgtcaggtgcagctggtggagtccgggggaggcgtggtccagcctgggaggtccctgagactctcctgtgcagcctctggattcaccttcagtaactatggctttcactgggtccgccagactccaggcaaggggctggagtgggtggcagttatctcatatgccggaagtaatagatactatgcagcctccgtgaagggccgattcaccatctccagagacaattccaagaacacgctgtatctccaaatgaacagcctgagaggtgaggacacggcgctatattactgtgcgagagtttactatggttcggggacttattataaaaaccgctactactacggtatggacgtctggggccaagggaccacggtcaccgtgtcctcagcctccaccaagggcccatcggtcttccccctggcaccctcctccaagagcacctctgggggcacagcggccctgggctgcctggtcaaggactacttccccgaaccggtgacggtgtcgtggaactcaggcgccctgaccagcggcgtgcacaccttcccggctgtcctacagtcctcaggactctactccctcagcagcgtggtgaccgtgccctccagcagcttgggcacccagacctacatctgcaacgtgaatcacaagcccagcaacaccaaggtggacaagaaagttgagcccaaatcttgtgacaaaactcacacatgcccaccgtgcccagcacctgaactcctggggggaccgtcagtcttcctcttccccccaaaacccaaggacaccctcatgatctcccggacccctgaggtcacatgcgtggtggtggacgtgagccacgaagaccctgaggtcaagttcaactggtacgtggacggcgtggaggtgcataatgccaagacaaagccgcgggaggagcagtacaacagcacgtaccgtgtggtcagcgtcctcaccgtcctgcaccaggactggctgaatggcaaggagtacaagtgcaaggtgtccaacaaagccctcccagcccccatcgagaaaaccatctccaaagccaaagggcagccccgagaaccacaggtgtacaccctgcccccatcccgggaggagatgaccaagaaccaggtcagcctgacctgcctggtcaaaggcttctatcccagcgacatcgccgtggagtgggagagcaatgggcagccggagaacaactacaagaccacgcctcccgtgctggactccgacggctccttcttcctctatagcaagctcaccgtggacaagagcaggtggcagcaggggaacgtcttctcatgctccgtgatgcatgaggctctgcacaaccactacacgcagaagagcctctccctgtctccgggcaaatag

SEQ ID NO: 1200 - DNA, 696 bp, synthetic construct
  misc_feature 1..696: note = Synthetic Peptide
  source 1..696: mol_type = other DNA
atggcctgggctctgctgctcctcaccctcctcactcagggcacagggtcctgggcctcatatgagctgactcagccaccctcagtgtcagtggccctgggacagacggccaggattacctgtgggggacacaacattggaagtaaaggtgtgcactggtaccagcagaagccaggccaggcccctgtactggtcatctatagacagagcaaccggccctctgggatccctgagcgattctctggctccaactctgggaacacagccactctgaccatcagcgggacccaggctgaagatgaggctgactattactgtcaggcgttcgacgccggcactgtggtattcggcggaggcacccagctgaccgtcctaggtcagcccaaggctgcaccctcggtcactctgttcccgccctcctctgaggagcttcaagccaacaaggccacactggtgtgtctcatcagtgacttctacccgggagccgtgacagtggcctggaaggcagatagcagccccgtcaaggcgggagtggaaaccaccacaccctccaaacaaagcaacaacaagtacgcggccagcagctatctgagcctgacgcctgagcagtggaagtcccacagaagctacagctgccaggtcacgcatgaagggagcaccgtggagaagacagtggcccctacagaatgttcatag

SEQ ID NO: 1201 - DNA, 1443 bp, synthetic construct
  misc_feature 1..1443: note = Synthetic Peptide
  source 1..1443: mol_type = other DNA
atggacatgagggtgcccgctcagctcctggggctcctgctgctgtggctgagaggtgcgcgctgtcaggtgcagctggtggagtccgggggaggcgtggtccagcctgggaggtccctgagactctcctgtgcagcctctggattcaccttcagtaactatggctttcactgggtccgccagactccaggcaaggggctggagtgggtggcagttatctcatatagcggaagtaatagatactatgcagactccgtgaagggccgattcaccatctccagagacaattccaagaacacgctgtatctccaaatgaacagcctgagaggtgaggacacggcgctatattactgtgcgagagtttactatggttcggggacttattataaaaaccgctactactacggtatggacgtctggggccaagggaccacggtcaccgtgtcctcagcctccaccaagggcccatcggtcttccccctggcaccctcctccaagagcacctctgggggcacagcggccctgggctgcctggtcaaggactacttccccgaaccggtgacggtgtcgtggaactcaggcgccctgaccagcggcgtgcacaccttcccggctgtcctacagtcctcaggactctactccctcagcagcgtggtgaccgtgccctccagcagcttgggcacccagacctacatctgcaacgtgaatcacaagcccagcaacaccaaggtggacaagaaagttgagcccaaatcttgtgacaaaactcacacatgcccaccgtgcccagcacctgaactcctggggggaccgtcagtcttcctcttccccccaaaacccaaggacaccctcatgatctcccggacccctgaggtcacatgcgtggtggtggacgtgagccacgaagaccctgaggtcaagttcaactggtacgtggacggcgtggaggtgcataatgccaagacaaagccgcgggaggagcagtacaacagcacgtaccgtgtggtcagcgtcctcaccgtcctgcaccaggactggctgaatggcaaggagtacaagtgcaaggtgtccaacaaagccctcccagcccccatcgagaaaaccatctccaaagccaaagggcagccccgagaaccacaggtgtacaccctgcccccatcccgggaggagatgaccaagaaccaggtcagcctgacctgcctggtcaaaggcttctatcccagcgacatcgccgtggagtgggagagcaatgggcagccggagaacaactacaagaccacgcctcccgtgctggactccgacggctccttcttcctctatagcaagctcaccgtggacaagagcaggtggcagcaggggaacgtcttctcatgctccgtgatgcatgaggctctgcacaaccactacacgcagaagagcctctccctgtctccgggcaaatag

SEQ ID NO: 1202 - DNA, 696 bp, synthetic construct
  misc_feature 1..696: note = Synthetic Peptide
  source 1..696: mol_type = other DNA
atggcctgggctctgctgctcctcaccctcctcactcagggcacagggtcctgggcctcatatgagctgactcagccaccctcagtgtcagtggccctgggacagacggccaggattacctgtgggggacacaacattggaagtaaaggtgtgcactggtaccagcagaagccaggccaggcccctgtactggtcatctatagacagagcaaccggccctctgggatccctgagcgattctctggctccaactctgggaacacagccactctgaccatcagcgggacccaggctggcgatgaggctgactattactgtcaggcgttcgacgccggcactgtggtattcggcggaggcacccagctgaccgtcctaggtcagcccaaggctgcaccctcggtcactctgttcccgccctcctctgaggagcttcaagccaacaaggccacactggtgtgtctcatcagtgacttctacccgggagccgtgacagtggcctggaaggcagatagcagccccgtcaaggcgggagtggaaaccaccacaccctccaaacaaagcaacaacaagtacgcggccagcagctatctgagcctgacgcctgagcagtggaagtcccacagaagctacagctgccaggtcacgcatgaagggagcaccgtggagaagacagtggcccctacagaatgttcatag

SEQ ID NO: 1203 - DNA, 696 bp, synthetic construct
  misc_feature 1..696: note = Synthetic Peptide
  source 1..696: mol_type = other DNA
atggcctgggctctgctgctcctcaccctcctcactcagggcacagggtcctgggcctcctatgaactgactcagccactctcagtgtcagtggccctgggacagacggccaggattacctgtgggggacacaacattggaagtaaaggtgtgcactggtaccagcagaagccaggccaggcccctgtgctggtcatctatagaaatagcaaccggccctctgggatccctgagcgattctctggctccaactcggggaacacggccaccctgaccatcagcagagcccaagccggggatgaggctgactattactgtcaggtgtgggacatcagcactgtggttttcggcggagggaccgagctgaccgtcctaggtcagcccaaggctgcaccctcggtcactctgttcccgccctcctctgaggagcttcaagccaacaaggccacactggtgtgtctcatcagtgacttctacccgggagccgtgacagtggcctggaaggcagatagcagccccgtcaaggcgggagtggaaaccaccacaccctccaaacaaagcaacaacaagtacgcggccagcagctatctgagcctgacgcctgagcagtggaagtcccacagaagctacagctgccaggtcacgcatgaagggagcaccgtggagaagacagtggcccctacagaatgttcatag

SEQ ID NO: 1204 - protein, 1443 aa, synthetic construct
  REGION 1..1443: note = Synthetic Peptide
ATGGACATGAGGGTGCCCGCTCAGCTCCTGGGGCTCCTGCTGCTGTGGCTGAGAGGTGCGCGCTGTCAGGTGCAGCTGGTGGAGTCTGGGGGAGGCGTGGCCCAGCCTGGGAGGTCCCTGAGACTCTCCTGTGCAGCCTCTGGATTCAACTTCAGTAACTGTGGCATGCACTGGGTCCGCCAGGCTCCAGGCAAGGGGCTGGAGTGGGTGGCAGTTATATCATATGATGGAGGTAATAAATATCATGCGGACTCCGTGAAGGGCCGGTTCACCATCTCCAGAGACGATTCCAAGAACACACTGTATCTGCAAATGGACAGCCTGAGAACTGAGGACACGGCTGTGTATTACTGTGCGAAAGTTTACTATGGTTCGGGTATTTATTATAAAAACAGGTACTACTACGGGATGGACGTCTGGGGCCAAGGGACCACGGTCACCGTCTCCTCAGCCTCCACCAAGGGCCCATCGGTCTTCCCCCTGGCACCCTCCTCCAAGAGCACCTCTGGGGGCACAGCGGCCCTGGGCTGCCTGGTCAAGGACTACTTCCCCGAACCGGTGACGGTGTCGTGGAACTCAGGCGCCCTGACCAGCGGCGTGCACACCTTCCCGGCTGTCCTACAGTCCTCAGGACTCTACTCCCTCAGCAGCGTGGTGACCGTGCCCTCCAGCAGCTTGGGCACCCAGACCTACATCTGCAACGTGAATCACAAGCCCAGCAACACCAAGGTGGACAAGAAAGTTGAGCCCAAATCTTGTGACAAAACTCACACATGCCCACCGTGCCCAGCACCTGAACTCCTGGGGGGACCGTCAGTCTTCCTCTTCCCCCCAAAACCCAAGGACACCCTCATGATCTCCCGGACCCCTGAGGTCACATGCGTGGTGGTGGACGTGAGCCACGAAGACCCTGAGGTCAAGTTCAACTGGTACGTGGACGGCGTGGAGGTGCATAATGCCAAGACAAAGCCGCGGGAGGAGCAGTACAACAGCACGTACCGTGTGGTCAGCGTCCTCACCGTCCTGCACCAGGACTGGCTGAATGGCAAGGAGTACAAGTGCAAGGTGTCCAACAAAGCCCTCCCAGCCCCCATCGAGAAAACCATCTCCAAAGCCAAAGGGCAGCCCCGAGAACCACAGGTGTACACCCTGCCCCCATCCCGGGAGGAGATGACCAAGAACCAGGTCAGCCTGACCTGCCTGGTCAAAGGCTTCTATCCCAGCGACATCGCCGTGGAGTGGGAGAGCAATGGGCAGCCGGAGAACAACTACAAGACCACGCCTCCCGTGCTGGACTCCGACGGCTCCTTCTTCCTCTATAGCAAGCTCACCGTGGACAAGAGCAGGTGGCAGCAGGGGAACGTCTTCTCATGCTCCGTGATGCATGAGGCTCTGCACAACCACTACACGCAGAAGAGCCTCTCCCTGTCTCCGGGCAAATAG

SEQ ID NO: 1205 - DNA, 696 bp, synthetic construct
  misc_feature 1..696: note = Synthetic Peptide
  source 1..696: mol_type = other DNA
atggcctgggctctgctgctcctcaccctcctcactcagggcacagggtcctgggcctcctatgagctgactcagccactctcagtgtcagtggccctgggacagacggccaggattacctgtgggggacacaacattggaagtaaaggtgtgcactggtaccagcagaagccaggccaggcccctgtgctggtcatctatagaaatagcaaccggccctctgggatccctgagcgattctctggctccaactcggggaaaacggccaccctgaccatcagcagagcccaagccggggatgaggctgactattactgtcaggtgtgggacagcagcactgtggttttcggcggagggaccgagctgaccgtcctaggtcagcccaaggctgcaccctcggtcactctgttcccgccctcctctgaggagcttcaagccaacaaggccacactggtgtgtctcatcagtgacttctacccgggagccgtgacagtggcctggaaggcagatagcagccccgtcaaggcgggagtggaaaccaccacaccctccaaacaaagcaacaacaagtacgcggccagcagctatctgagcctgacgcctgagcagtggaagtcccacagaagctacagctgccaggtcacgcatgaagggagcaccgtggagaagacagtggcccctacagaatgttcatag

SEQ ID NO: 1206 - DNA, 1443 bp, synthetic construct
  misc_feature 1..1443: note = Synthetic Peptide
  source 1..1443: mol_type = other DNA
atggacatgagggtgcccgctcagctcctggggctcctgctgctgtggctgagaggtgcgcgctgtcaggtgcagctggtggagtctgggggaggcgtggcccagcctgggaggtccctgagactctcctgtgcagcctctggattcaacttcagtaactgtggcatgcactgggtccgccaggctccaggcaaggggctggagtgggtggcagttatatcatatgatggaggtaataaatattatgcggactccgtgaagggccggttcaccatctccagagacgattccaagaacacactgtatctgcaaatggacagcctgagaactgaggacacggctgtgtattactgtgcgaaagtttactatggttcgggtatttattataaaaacaggtattactacgggatggacgtctggggccaagggaccacggtcaccgtctcctcagcctccaccaagggcccatcggtcttccccctggcaccctcctccaagagcacctctgggggcacagcggccctgggctgcctggtcaaggactacttccccgaaccggtgacggtgtcgtggaactcaggcgccctgaccagcggcgtgcacaccttcccggctgtcctacagtcctcaggactctactccctcagcagcgtggtgaccgtgccctccagcagcttgggcacccagacctacatctgcaacgtgaatcacaagcccagcaacaccaaggtggacaagaaagttgagcccaaatcttgtgacaaaactcacacatgcccaccgtgcccagcacctgaactcctggggggaccgtcagtcttcctcttccccccaaaacccaaggacaccctcatgatctcccggacccctgaggtcacatgcgtggtggtggacgtgagccacgaagaccctgaggtcaagttcaactggtacgtggacggcgtggaggtgcataatgccaagacaaagccgcgggaggagcagtacaacagcacgtaccgtgtggtcagcgtcctcaccgtcctgcaccaggactggctgaatggcaaggagtacaagtgcaaggtgtccaacaaagccctcccagcccccatcgagaaaaccatctccaaagccaaagggcagccccgagaaccacaggtgtacaccctgcccccatcccgggaggagatgaccaagaaccaggtcagcctgacctgcctggtcaaaggcttctatcccagcgacatcgccgtggagtgggagagcaatgggcagccggagaacaactacaagaccacgcctcccgtgctggactccgacggctccttcttcctctatagcaagctcaccgtggacaagagcaggtggcagcaggggaacgtcttctcatgctccgtgatgcatgaggctctgcacaaccactacacgcagaagagcctctccctgtctccgggcaaatag

SEQ ID NO: 1207 - DNA, 696 bp, synthetic construct
  misc_feature 1..696: note = Synthetic Peptide
  source 1..696: mol_type = other DNA
atggcctgggctctgctgctcctcaccctcctcactcagggcacagggtcctgggcctcctatgagctgactcagccactctcagtgtcagtggccctgggacagacggccaggattacctgtgggggaaacaacattggaagtaaaaatgtgcactggtaccagaagaggccaggccaggcccctgtgctggtcatctatagggatagcaaccggccctctgggatccctgagcgattctctggctccaagtcggggaacacggccaccctgaccatcagcagagcccaagccggggatgaggctgactattactgtcaggtgtgggacagcaacactgtggttttcggcggagggaccaacctgaccgtcctaggtcagcccaaggctgcaccctcggtcactctgttcccgccctcctctgaggagcttcaagccaacaaggccacactggtgtgtctcatcagtgacttctacccgggagccgtgacagtggcctggaaggcagatagcagccccgtcaaggcgggagtggaaaccaccacaccctccaaacaaagcaacaacaagtacgcggccagcagctatctgagcctgacgcctgagcagtggaagtcccacagaagctacagctgccaggtcacgcatgaagggagcaccgtggagaagacagtggcccctacagaatgttcatag

SEQ ID NO: 1208 - DNA, 1443 bp, synthetic construct
  misc_feature 1..1443: note = Synthetic Peptide
  source 1..1443: mol_type = other DNA
atggacatgagggtgcccgctcagctcctggggctcctgctgctgtggctgagaggtgcgcgctgtcaggtgcagctggtggagtctgggggaggcgtggtccagcctgggaggtccctgagactctcctgtgtagtctctggattcaacttcagtaacaatggcatgcactgggtccgccaggctccaggcaagggactggagtgggtggcagttatttcaaatgatggcagtaataaatattatgcagattccgtgaggggccgattcaccatctccagagacaattccaagaacacgctgtatctgcaaatgaacagcctgagagctgaggacacggctgtgtattcctgtgcgaaagtttactatggttcgggaatttattacaaaaataactactactacggtatggacgtctggggccaagggaccacggtcaccgtctcctcagcctccaccaagggcccatcggtcttccccctggcaccctcctccaagagcacctctgggggcacagcggccctgggctgcctggtcaaggactacttccccgaaccggtgacggtgtcgtggaactcaggcgccctgaccagcggcgtgcacaccttcccggctgtcctacagtcctcaggactctactccctcagcagcgtggtgaccgtgccctccagcagcttgggcacccagacctacatctgcaacgtgaatcacaagcccagcaacaccaaggtggacaagaaagttgagcccaaatcttgtgacaaaactcacacatgcccaccgtgcccagcacctgaactcctggggggaccgtcagtcttcctcttccccccaaaacccaaggacaccctcatgatctcccggacccctgaggtcacatgcgtggtggtggacgtgagccacgaagaccctgaggtcaagttcaactggtacgtggacggcgtggaggtgcataatgccaagacaaagccgcgggaggagcagtacaacagcacgtaccgtgtggtcagcgtcctcaccgtcctgcaccaggactggctgaatggcaaggagtacaagtgcaaggtgtccaacaaagccctcccagcccccatcgagaaaaccatctccaaagccaaagggcagccccgagaaccacaggtgtacaccctgcccccatcccgggaggagatgaccaagaaccaggtcagcctgacctgcctggtcaaaggcttctatcccagcgacatcgccgtggagtgggagagcaatgggcagccggagaacaactacaagaccacgcctcccgtgctggactccgacggctccttcttcctctatagcaagctcaccgtggacaagagcaggtggcagcaggggaacgtcttctcatgctccgtgatgcatgaggctctgcacaaccactacacgcagaagagcctctccctgtctccgggcaaatag

SEQ ID NO: 1209 - DNA, 696 bp, synthetic construct
  misc_feature 1..696: note = Synthetic Peptide
  source 1..696: mol_type = other DNA
atggcctgggctctgctgctcctcaccctcctcactcagggcacagggtcctgggcctcctatgagctgactcagccactctcagtgtcagtggccctgggacagacggccaggattacctgtgggggaaacaacattggaagtaaaaatgtgcactggtaccagcagaaggcaggccaggcccctgtgcaggtcatctatagaaatagcaaccggccctctgggatccctgagcgattctctggctccaactcggggaacacggccaccctgaccatcagcagagcccaggccggggatgaggctgactattactgtcaggtgtgggacagcagcactgtggttttcggcggtgggaccaagctgaccgtcctaggtcagcccaaggctgcaccctcggtcactctgttcccgccctcctctgaggagcttcaagccaacaaggccacactggtgtgtctcatcagtgacttctacccgggagccgtgacagtggcctggaaggcagatagcagccccgtcaaggcgggagtggaaaccaccacaccctccaaacaaagcaacaacaagtacgcggccagcagctatctgagcctgacgcctgagcagtggaagtcccacagaagctacagctgccaggtcacgcatgaagggagcaccgtggagaagacagtggcccctacagaatgttcatag

SEQ ID NO: 1210 - DNA, 1443 bp, synthetic construct
  misc_feature 1..1443: note = Synthetic Peptide
  source 1..1443: mol_type = other DNA
atggacatgagggtgcccgctcagctcctggggctcctgctgctgtggctgagaggtgcgcgctgtcaggtgcagctggtggagtctgggggaggcgtggtccagcctgggaggtccctgagactctcctgtgcagcctctggattcaacttcaatacctatggcatgcactgggtccgccaggctccaggcaaggggctggagtgggtggcagttatatcatatgatggaagtaataaatattatgcagactccgtgaagggccgattcaccatctccagagacaattccaagagcacgctgtatctgcaaatgaacagcctgagagctgaggacacggctgtgtattactgtgcgagagtttactatggttcggggagttattataaaaagaattactactacggtatggacgtctggggccaagggaccacggtcaccgtctcctcagcctccaccaagggcccatcggtcttccccctggcaccctcctccaagagcacctctgggggcacagcggccctgggctgcctggtcaaggactacttccccgaaccggtgacggtgtcgtggaactcaggcgccctgaccagcggcgtgcacaccttcccggctgtcctacagtcctcaggactctactccctcagcagcgtggtgaccgtgccctccagcagcttgggcacccagacctacatctgcaacgtgaatcacaagcccagcaacaccaaggtggacaagaaagttgagcccaaatcttgtgacaaaactcacacatgcccaccgtgcccagcacctgaactcctggggggaccgtcagtcttcctcttccccccaaaacccaaggacaccctcatgatctcccggacccctgaggtcacatgcgtggtggtggacgtgagccacgaagaccctgaggtcaagttcaactggtacgtggacggcgtggaggtgcataatgccaagacaaagccgcgggaggagcagtacaacagcacgtaccgtgtggtcagcgtcctcaccgtcctgcaccaggactggctgaatggcaaggagtacaagtgcaaggtgtccaacaaagccctcccagcccccatcgagaaaaccatctccaaagccaaagggcagccccgagaaccacaggtgtacaccctgcccccatcccgggaggagatgaccaagaaccaggtcagcctgacctgcctggtcaaaggcttctatcccagcgacatcgccgtggagtgggagagcaatgggcagccggagaacaactacaagaccacgcctcccgtgctggactccgacggctccttcttcctctatagcaagctcaccgtggacaagagcaggtggcagcaggggaacgtcttctcatgctccgtgatgcatgaggctctgcacaaccactacacgcagaagagcctctccctgtctccgggcaaatag

SEQ ID NO: 1211 - DNA, 696 bp, synthetic construct
  misc_feature 1..696: note = Synthetic Peptide
  source 1..696: mol_type = other DNA
atggcctgggctctgctgctcctcaccctcctcactcagggcacagggtcctgggcctcctatgagctgactcagccactctcagtgtcagtggccctgggacagacggccaggattacctgtgggggaaacaacattggaggtaaaaatgtgcactggtaccagcagaagccaggccaggcccctgtgctggtcatctatagggatagcaaccggccctctgggatccctgagcgattctctggctccaagtcggggaacacggccaccctgaccatcagcagagcccaagccggggatgagtctgactattactgtcaggtttgggacagcagcactgtggtattcggcggagggaccacgctgaccgtcctaggtcagcccaaggctgcaccctcggtcactctgttcccgccctcctctgaggagcttcaagccaacaaggccacactggtgtgtctcatcagtgacttctacccgggagccgtgacagtggcctggaaggcagatagcagccccgtcaaggcgggagtggaaaccaccacaccctccaaacaaagcaacaacaagtacgcggccagcagctatctgagcctgacgcctgagcagtggaagtcccacagaagctacagctgccaggtcacgcatgaagggagcaccgtggagaagacagtggcccctacagaatgttcatag

SEQ ID NO: 1212 - DNA, 1443 bp, synthetic construct
  misc_feature 1..1443: note = Synthetic Peptide
  source 1..1443: mol_type = other DNA
atggacatgagggtgcccgctcagctcctggggctcctgctgctgtggctgagaggtgcgcgctgtcaggtgcaggtggtggagtctgggggaggcgtggtccagcctgggaggtccctgagactctcctgtgcagcctctggattcaccctcagtagttatggctttcactgggtccgccagactccaggcaaggggctggagtgggtggcagttatatcatatgatggaagtaataaatactatgcagactccgtgaagggccgattcaccatctccagagacaattccaagaacacgctgtatctccaaatgaacagcctgagaggtgaggacacggcggtgtattactgtgcgagagtttactatggttcggggacttattataaaaaccgctactactacggtatggacgtctggggccaagggaccacggtcaccgtctcctcagcctccaccaagggcccatcggtcttccccctggcaccctcctccaagagcacctctgggggcacagcggccctgggctgcctggtcaaggactacttccccgaaccggtgacggtgtcgtggaactcaggcgccctgaccagcggcgtgcacaccttcccggctgtcctacagtcctcaggactctactccctcagcagcgtggtgaccgtgccctccagcagcttgggcacccagacctacatctgcaacgtgaatcacaagcccagcaacaccaaggtggacaagaaagttgagcccaaatcttgtgacaaaactcacacatgcccaccgtgcccagcacctgaactcctggggggaccgtcagtcttcctcttccccccaaaacccaaggacaccctcatgatctcccggacccctgaggtcacatgcgtggtggtggacgtgagccacgaagaccctgaggtcaagttcaactggtacgtggacggcgtggaggtgcataatgccaagacaaagccgcgggaggagcagtacaacagcacgtaccgtgtggtcagcgtcctcaccgtcctgcaccaggactggctgaatggcaaggagtacaagtgcaaggtgtccaacaaagccctcccagcccccatcgagaaaaccatctccaaagccaaagggcagccccgagaaccacaggtgtacaccctgcccccatcccgggaggagatgaccaagaaccaggtcagcctgacctgcctggtcaaaggcttctatcccagcgacatcgccgtggagtgggagagcaatgggcagccggagaacaactacaagaccacgcctcccgtgctggactccgacggctccttcttcctctatagcaagctcaccgtggacaagagcaggtggcagcaggggaacgtcttctcatgctccgtgatgcatgaggctctgcacaaccactacacgcagaagagcctctccctgtctccgggcaaatag

SEQ ID NO: 1213 - DNA, 696 bp, synthetic construct
  misc_feature 1..696: note = Synthetic Peptide
  source 1..696: mol_type = other DNA
atggcctgggctctgctgctcctcaccctcctcactcagggcacagggtcctgggcctcctatgagctgactcagccactctcagtgtcagaggccctgggacagacggccaggattacctgtgggggaaacaacattggaagtaaaaatgtgcactggtaccagcagaagccaggccaggcccctgtactggtcatctatagggatagcaaccggccctctgggatccctgagcgattctctggctccaagtcggggaacacggccaccctgaccatcagcagagcccaagccggggatgaggctgactattactgtcaggtgtgggacagcagcactgtggttttcggcggagggaccaaggtgaccgtcctaggtcagcccaaggctgcaccctcggtcactctgttcccgccctcctctgaggagcttcaagccaacaaggccacactggtgtgtctcatcagtgacttctacccgggagccgtgacagtggcctggaaggcagatagcagccccgtcaaggcgggagtggaaaccaccacaccctccaaacaaagcaacaacaagtacgcggccagcagctatctgagcctgacgcctgagcagtggaagtcccacagaagctacagctgccaggtcacgcatgaagggagcaccgtggagaagacagtggcccctacagaatgttcatag

SEQ ID NO: 1214 - DNA, 1443 bp, synthetic construct
  misc_feature 1..1443: note = Synthetic Peptide
  source 1..1443: mol_type = other DNA
atggacatgagggtgcccgctcagctcctggggctcctgctgctgtggctgagaggtgcgcgctgtcaggtgcagctggtggagtctgggggaggcgtggtccagcctgggaggtccctgagactctcctgtgtagtctctggattcaacttcattaacaatggcatgcactgggtccgccaggctccaggcaaggggctggactgggtggcagttatatcaaatgatggaagtaataaatactatccagactccgtgaagggccgattcaccatctccagagacaattccaagaacacgctgtatctgcaaatgaacagcctgagagctgaggactcggctgtgtattactgtgcgaaagtttactatggttcgggaaattattataaaaacaactactactacggtatggacgtctggggccaagggaccacggtcaccgtctcctcagcctccaccaagggcccatcggtcttccccctggcaccctcctccaagagcacctctgggggcacagcggccctgggctgcctggtcaaggactacttccccgaaccggtgacggtgtcgtggaactcaggcgccctgaccagcggcgtgcacaccttcccggctgtcctacagtcctcaggactctactccctcagcagcgtggtgaccgtgccctccagcagcttgggcacccagacctacatctgcaacgtgaatcacaagcccagcaacaccaaggtggacaagaaagttgagcccaaatcttgtgacaaaactcacacatgcccaccgtgcccagcacctgaactcctggggggaccgtcagtcttcctcttccccccaaaacccaaggacaccctcatgatctcccggacccctgaggtcacatgcgtggtggtggacgtgagccacgaagaccctgaggtcaagttcaactggtacgtggacggcgtggaggtgcataatgccaagacaaagccgcgggaggagcagtacaacagcacgtaccgtgtggtcagcgtcctcaccgtcctgcaccaggactggctgaatggcaaggagtacaagtgcaaggtgtccaacaaagccctcccagcccccatcgagaaaaccatctccaaagccaaagggcagccccgagaaccacaggtgtacaccctgcccccatcccgggaggagatgaccaagaaccaggtcagcctgacctgcctggtcaaaggcttctatcccagcgacatcgccgtggagtgggagagcaatgggcagccggagaacaactacaagaccacgcctcccgtgctggactccgacggctccttcttcctctatagcaagctcaccgtggacaagagcaggtggcagcaggggaacgtcttctcatgctccgtgatgcatgaggctctgcacaaccactacacgcagaagagcctctccctgtctccgggcaaatag

SEQ ID NO: 1215 - DNA, 696 bp, synthetic construct
  misc_feature 1..696: note = Synthetic Peptide
  source 1..696: mol_type = other DNA
atggcctgggctctgctgctcctcaccctcctcactcagggcacagggtcctgggcctcctatgagctgactcagccactctcagtgtcagtggccctgggacagacggccaggattacctgtgagggaaacaacattggaagtcaaaatgtgcactggtaccagcagaagccaggccaggcccctgtgctggtcatgtatagggatagcaaccggccctctgggatccctgaacgattctctggctccaagtcggggaacacggccaccctggccatcagcagagcccaagccggggatgagtctgactattactgtcaggtgtgggacggcagtgccgtggtattcggcggagggaccacgctgaccgtcctaggtcagcccaaggctgcaccctcggtcactctgttcccgccctcctctgaggagcttcaagccaacaaggccacactggtgtgtctcatcagtgacttctacccgggagccgtgacagtggcctggaaggcagatagcagccccgtcaaggcgggagtggaaaccaccacaccctccaaacaaagcaacaacaagtacgcggccagcagctatctgagcctgacgcctgagcagtggaagtcccacagaagctacagctgccaggtcacgcatgaagggagcaccgtggagaagacagtggcccctacagaatgttcatag

SEQ ID NO: 1216 - DNA, 1443 bp, synthetic construct
  misc_feature 1..1443: note = Synthetic Peptide
  source 1..1443: mol_type = other DNA
atggacatgagggtgcccgctcagctcctggggctcctgctgctgtggctgagaggtgcgcgctgtcagatgcaggtggtggagtctgggggaggcgtggtccagcctgggaggtccctgagactctcctgtgcagcctctggattcaccttcagtagctctggcatgcactgggtccgccaggctccaggcaagggcctggagtgggtggcagttatatcacatgatggaagtaataaatactatgcagactccgtgaagggccgattcaccatctccagagacaattccaagaacacgctgtatctgcaaatgaatagcctgggaggtgaggacacggcggtgtattactgtgcgaaagtttactatggttcggggatttattataaaaaccgctattactacggtatggacgtctggggccaagggaccacggtcatcgtctcgtcagcctccaccaagggcccatcggtcttccccctggcaccctcctccaagagcacctctgggggcacagcggccctgggctgcctggtcaaggactacttccccgaaccggtgacggtgtcgtggaactcaggcgccctgaccagcggcgtgcacaccttcccggctgtcctacagtcctcaggactctactccctcagcagcgtggtgaccgtgccctccagcagcttgggcacccagacctacatctgcaacgtgaatcacaagcccagcaacaccaaggtggacaagaaagttgagcccaaatcttgtgacaaaactcacacatgcccaccgtgcccagcacctgaactcctggggggaccgtcagtcttcctcttccccccaaaacccaaggacaccctcatgatctcccggacccctgaggtcacatgcgtggtggtggacgtgagccacgaagaccctgaggtcaagttcaactggtacgtggacggcgtggaggtgcataatgccaagacaaagccgcgggaggagcagtacaacagcacgtaccgtgtggtcagcgtcctcaccgtcctgcaccaggactggctgaatggcaaggagtacaagtgcaaggtgtccaacaaagccctcccagcccccatcgagaaaaccatctccaaagccaaagggcagccccgagaaccacaggtgtacaccctgcccccatcccgggaggagatgaccaagaaccaggtcagcctgacctgcctggtcaaaggcttctatcccagcgacatcgccgtggagtgggagagcaatgggcagccggagaacaactacaagaccacgcctcccgtgctggactccgacggctccttcttcctctatagcaagctcaccgtggacaagagcaggtggcagcaggggaacgtcttctcatgctccgtgatgcatgaggctctgcacaaccactacacgcagaagagcctctccctgtctccgggcaaatag

SEQ ID NO: 1217 - DNA, 696 bp, synthetic construct
  misc_feature 1..696: note = Synthetic Peptide
  source 1..696: mol_type = other DNA
atggcctgggctctgctgctcctcaccctcctcactcagggcacagggtcctgggcctcctatgagctgactcagccactctcagtgtcagtggccctgggacagacggccaggattacctgtgggggacacaacattggaagtaaaggtgtgcactggtaccagcagaagccaggccaggcccctgtgctggtcatctatagaaatagcaaccggccctctgggatccctgagcgattctctggctccaactcggggaacacggccaccctgaccatcagcagagcccaagccggggatgaggctgactattactgtcaggtgtgggacagcagcactgtggttttcggcggagggaccgagctgaccgtcctaggtcagcccaaggctgcaccctcggtcactctgttcccgccctcctctgaggagcttcaagccaacaaggccacactggtgtgtctcatcagtgacttctacccgggagccgtgacagtggcctggaaggcagatagcagccccgtcaaggcgggagtggaaaccaccacaccctccaaacaaagcaacaacaagtacgcggccagcagctatctgagcctgacgcctgagcagtggaagtcccacagaagctacagctgccaggtcacgcatgaagggagcaccgtggagaagacagtggcccctacagaatgttcatag

SEQ ID NO: 1218 - DNA, 1443 bp, synthetic construct
  misc_feature 1..1443: note = Synthetic Peptide
  source 1..1443: mol_type = other DNA
atggacatgagggtgcccgctcagctcctggggctcctgctgctgtggctgagaggtgcgcgctgtcaggtgcagctggtggagtctgggggaggcgtggcccagcctgggaggtccctgagactctcctgtgcagcctctggattcaacttcagtgattgtggcatgcactgggtccgccaggctccaggcaaggggctggagtgggtggcagttatatcatatgatggaggtaataaatattatgcggactccgtgaagggccggttcaccatctccagagacgattccaagaacacactgtatctgcaaacggacagcctgagaactgaggacacggctgtgtattactgtgcgaaagtttactatggttcgggtatttattataaaaacaggtactactacgggatggacgtctggggccaagggaccacggtcaccgtctcctcagcctccaccaagggcccatcggtcttccccctggcaccctcctccaagagcacctctgggggcacagcggccctgggctgcctggtcaaggactacttccccgaaccggtgacggtgtcgtggaactcaggcgccctgaccagcggcgtgcacaccttcccggctgtcctacagtcctcaggactctactccctcagcagcgtggtgaccgtgccctccagcagcttgggcacccagacctacatctgcaacgtgaatcacaagcccagcaacaccaaggtggacaagaaagttgagcccaaatcttgtgacaaaactcacacatgcccaccgtgcccagcacctgaactcctggggggaccgtcagtcttcctcttccccccaaaacccaaggacaccctcatgatctcccggacccctgaggtcacatgcgtggtggtggacgtgagccacgaagaccctgaggtcaagttcaactggtacgtggacggcgtggaggtgcataatgccaagacaaagccgcgggaggagcagtacaacagcacgtaccgtgtggtcagcgtcctcaccgtcctgcaccaggactggctgaatggcaaggagtacaagtgcaaggtgtccaacaaagccctcccagcccccatcgagaaaaccatctccaaagccaaagggcagccccgagaaccacaggtgtacaccctgcccccatcccgggaggagatgaccaagaaccaggtcagcctgacctgcctggtcaaaggcttctatcccagcgacatcgccgtggagtgggagagcaatgggcagccggagaacaactacaagaccacgcctcccgtgctggactccgacggctccttcttcctctatagcaagctcaccgtggacaagagcaggtggcagcaggggaacgtcttctcatgctccgtgatgcatgaggctctgcacaaccactacacgcagaagagcctctccctgtctccgggcaaatag

SEQ ID NO: 1219 - DNA, 696 bp, synthetic construct
  misc_feature 1..696: note = Synthetic Peptide
  source 1..696: mol_type = other DNA
atggcctgggctctgctgctcctcaccctcctcactcagggcacagggtcctgggcctcctatgagctgactcagccactctcagtgtcagtggccctgggacagacgggcaggattacctgtgggggaaacaacattggaagtaaaaatgtgcactggtaccagcagaagccaggccaggcccctgtgctggtcatctataggagtagcaaccggccctctgggatccctgagcgattctctggctccaactcggggaacacggccaccctgaccatcagcagagcccaagccggggatgagtctgactattactgtcaaatatgggacagcagcactgtggtattcggcggagggaccaagctgaccgtcctaggtcagcccaaggctgcaccctcggtcactctgttcccgccctcctctgaggagcttcaagccaacaaggccacactggtgtgtctcatcagtgacttctacccgggagccgtgacagtggcctggaaggcagatagcagccccgtcaaggcgggagtggaaaccaccacaccctccaaacaaagcaacaacaagtacgcggccagcagctatctgagcctgacgcctgagcagtggaagtcccacagaagctacagctgccaggtcacgcatgaagggagcaccgtggagaagacagtggcccctacagaatgttcatag

SEQ ID NO: 1220 - DNA, 1443 bp, synthetic construct
  misc_feature 1..1443: note = Synthetic Peptide
  source 1..1443: mol_type = other DNA
atggacatgagggtgcccgctcagctcctggggctcctgctgctgtggctgagaggtgcgcgctgtcaggtgcaggtggtggagtctgggggaggcgtggtccagcctgggaggtccctgagactctcctgtgcagcctctggattcaccttcagtagctatggcatgcactgggtccgccaggctccaggcaaggggctggagtgggtggcagttatatcatttgatggaaataataaatactatgcagactccgtgaagggccgattcaccatctccagagacaattccaagaacacgctatatctgcaaatgaacagcctgagaggtgaggacacggcggtgtattactgtgcgagagtttattatggttcggggagttattataaaaaccgctactactacggtatggacgtctggggccaagggaccacggtcaccgtctccacagcctccaccaagggcccatcggtcttccccctggcaccctcctccaagagcacctctgggggcacagcggccctgggctgcctggtcaaggactacttccccgaaccggtgacggtgtcgtggaactcaggcgccctgaccagcggcgtgcacaccttcccggctgtcctacagtcctcaggactctactccctcagcagcgtggtgaccgtgccctccagcagcttgggcacccagacctacatctgcaacgtgaatcacaagcccagcaacaccaaggtggacaagaaagttgagcccaaatcttgtgacaaaactcacacatgcccaccgtgcccagcacctgaactcctggggggaccgtcagtcttcctcttccccccaaaacccaaggacaccctcatgatctcccggacccctgaggtcacatgcgtggtggtggacgtgagccacgaagaccctgaggtcaagttcaactggtacgtggacggcgtggaggtgcataatgccaagacaaagccgcgggaggagcagtacaacagcacgtaccgtgtggtcagcgtcctcaccgtcctgcaccaggactggctgaatggcaaggagtacaagtgcaaggtgtccaacaaagccctcccagcccccatcgagaaaaccatctccaaagccaaagggcagccccgagaaccacaggtgtacaccctgcccccatcccgggaggagatgaccaagaaccaggtcagcctgacctgcctggtcaaaggcttctatcccagcgacatcgccgtggagtgggagagcaatgggcagccggagaacaactacaagaccacgcctcccgtgctggactccgacggctccttcttcctctatagcaagctcaccgtggacaagagcaggtggcagcaggggaacgtcttctcatgctccgtgatgcatgaggctctgcacaaccactacacgcagaagagcctctccctgtctccgggcaaatag

SEQ ID NO: 1221 - DNA, 696 bp, synthetic construct
  misc_feature 1..696: note = Synthetic Peptide
  source 1..696: mol_type = other DNA
atggcctgggctctgctgctcctcaccctcctcactcagggcacagggtcctgggcctcctatgaactgactcagccactctcagtgtcagtggccctgggacagacggccaggattacctgtgggggaaacaacattggaagtaaaaatgtacactggtaccagcagaggccaggccaggcccctgtgttggtcatctacagggatagcaaccggccctctgggatccctgagcgattatctggctccaaagcggggaacacggccaccctgaccatcagcagagcccacgccggggatgaggctgactattactgtcaggtgtgggacagcagcactgtggttttcggcggagggaccgagctgaccgtccaaggtcagcccaaggctgcaccctcggtcactctgttcccgccctcctctgaggagcttcaagccaacaaggccacactggtgtgtctcatcagtgacttctacccgggagccgtgacagtggcctggaaggcagatagcagccccgtcaaggcgggagtggaaaccaccacaccctccaaacaaagcaacaacaagtacgcggccagcagctatctgagcctgacgcctgagcagtggaagtcccacagaagctacagctgccaggtcacgcatgaagggagcaccgtggagaagacagtggcccctacagaatgttcatag

SEQ ID NO: 1222 - DNA, 1443 bp, synthetic construct
  misc_feature 1..1443: note = Synthetic Peptide
  source 1..1443: mol_type = other DNA
atggacatgagggtgcccgctcagctcctggggctcctgctgctgtggctgagaggtgcgcgctgtcaggtgcaattggtggagtctgggggaggcgtggtccagcctgggaggtctctgagactctcctgtgcagtctctggattcacgttcagtagcaatggcatgcactgggtccgccaggctccaggcaaggggctggagtgggtggcagttatatcaaatgatggaagtaataaatattatggagactccgtgaagggccgattcaccatctccagagacaattccaagaacacgctgtatctgcaaatgaacagcctgagagctgaggacacggctgtgtattactgtgcgaaagtttactatggttcgggaatttattacagaaacaactactactacggtatggacgtctggggccaagggaccacggtcaccgtctcctcagcctccaccaagggcccatcggtcttccccctggcaccctcctccaagagcacctctgggggcacagcggccctgggctgcctggtcaaggactacttccccgaaccggtgacggtgtcgtggaactcaggcgccctgaccagcggcgtgcacaccttcccggctgtcctacagtcctcaggactctactccctcagcagcgtggtgaccgtgccctccagcagcttgggcacccagacctacatctgcaacgtgaatcacaagcccagcaacaccaaggtggacaagaaagttgagcccaaatcttgtgacaaaactcacacatgcccaccgtgcccagcacctgaactcctggggggaccgtcagtcttcctcttccccccaaaacccaaggacaccctcatgatctcccggacccctgaggtcacatgcgtggtggtggacgtgagccacgaagaccctgaggtcaagttcaactggtacgtggacggcgtggaggtgcataatgccaagacaaagccgcgggaggagcagtacaacagcacgtaccgtgtggtcagcgtcctcaccgtcctgcaccaggactggctgaatggcaaggagtacaagtgcaaggtgtccaacaaagccctcccagcccccatcgagaaaaccatctccaaagccaaagggcagccccgagaaccacaggtgtacaccctgcccccatcccgggaggagatgaccaagaaccaggtcagcctgacctgcctggtcaaaggcttctatcccagcgacatcgccgtggagtgggagagcaatgggcagccggagaacaactacaagaccacgcctcccgtgctggactccgacggctccttcttcctctatagcaagctcaccgtggacaagagcaggtggcagcaggggaacgtcttctcatgctccgtgatgcatgaggctctgcacaaccactacacgcagaagagcctctccctgtctccgggcaaatag

SEQ ID NO: 1223 - DNA, 696 bp, synthetic construct
  misc_feature 1..696: note = Synthetic Peptide
  source 1..696: mol_type = other DNA
atggcctgggctctgctgctcctcaccctcctcactcagggcacagggtcctgggcctcctatgagctgactcagccactctcagtgtcagtggccctgggacagacggccaggattacctgtgggggaaacaacattggaagtaaaaatgtgcactggtaccagcagaagccaggccaggcccctatactggtcatctataggaataccaaccggccctctgggatccctgagcgattctctggctccaactcggggaacacggccaccctgaccatcagcagagcccaagtcggggatgagtctgactatttctgtcaggtgtgggacagcagcactgtggtattcggcggagggaccaagctgaccgtcctaggtcagcccaaggctgcaccctcggtcactctgttcccgccctcctctgaggagcttcaagccaacaaggccacactggtgtgtctcatcagtgacttctacccgggagccgtgacagtggcctggaaggcagatagcagccccgtcaaggcgggagtggaaaccaccacaccctccaaacaaagcaacaacaagtacgcggccagcagctatctgagcctgacgcctgagcagtggaagtcccacagaagctacagctgccaggtcacgcatgaagggagcaccgtggagaagacagtggcccctacagaatgttcatag

SEQ ID NO: 1224 - DNA, 1443 bp, synthetic construct
  misc_feature 1..1443: note = Synthetic Peptide
  source 1..1443: mol_type = other DNA
atggacatgagggtgcccgctcagctcctggggctcctgctgctgtggctgagaggtgcgcgctgtcaggtgcaggtggtggagtctgggggaggcgtggtccagcctgggaggtccctgagactctcctgtggagcctctggattcaccttcagtggctatggcatgcactgggtccgccaggctccaggcaaggggctggagtgggtggcagttatatcatatgatggaagtaataaatactatgcagactccgtgaagggccgattccccatctcaagagacaattccaagaacacgctgtatctgcaaatgaacagcctgagaggtgaggacacggcggtgtattactgtgcgagagtttattatggttcggggatttattataaaaaccgctactactacggtatggacgtctggggccaagggaccacggtcgccgtctcctcagcctccaccaagggcccatcggtcttccccctggcaccctcctccaagagcacctctgggggcacagcggccctgggctgcctggtcaaggactacttccccgaaccggtgacggtgtcgtggaactcaggcgccctgaccagcggcgtgcacaccttcccggctgtcctacagtcctcaggactctactccctcagcagcgtggtgaccgtgccctccagcagcttgggcacccagacctacatctgcaacgtgaatcacaagcccagcaacaccaaggtggacaagaaagttgagcccaaatcttgtgacaaaactcacacatgcccaccgtgcccagcacctgaactcctggggggaccgtcagtcttcctcttccccccaaaacccaaggacaccctcatgatctcccggacccctgaggtcacatgcgtggtggtggacgtgagccacgaagaccctgaggtcaagttcaactggtacgtggacggcgtggaggtgcataatgccaagacaaagccgcgggaggagcagtacaacagcacgtaccgtgtggtcagcgtcctcaccgtcctgcaccaggactggctgaatggcaaggagtacaagtgcaaggtgtccaacaaagccctcccagcccccatcgagaaaaccatctccaaagccaaagggcagccccgagaaccacaggtgtacaccctgcccccatcccgggaggagatgaccaagaaccaggtcagcctgacctgcctggtcaaaggcttctatcccagcgacatcgccgtggagtgggagagcaatgggcagccggagaacaactacaagaccacgcctcccgtgctggactccgacggctccttcttcctctatagcaagctcaccgtggacaagagcaggtggcagcaggggaacgtcttctcatgctccgtgatgcatgaggctctgcacaaccactacacgcagaagagcctctccctgtctccgggcaaatag

SEQ ID NO: 1225 - DNA, 696 bp, synthetic construct; identical to SEQ ID NO: 1223
  misc_feature 1..696: note = Synthetic Peptide
  source 1..696: mol_type = other DNA

SEQ ID NO: 1226 - DNA, 1443 bp, synthetic construct
  misc_feature 1..1443: note = Synthetic Peptide
  source 1..1443: mol_type = other DNA
atggacatgagggtgcccgctcagctcctggggctcctgctgctgtggctgagaggtgcgcgctgtcaggtgcaggtggtggagtctgggggaggcgtggtccagcctgggaggtccctgagactctcctgtggagcctctggattcaccttcagtggctatggcatgcactgggtccgccaggctccaggcaaggggctggagtgggtggcagttatatcatatgatggaagtaataaatactatgcagactccgtgaagggccgattcaccatctcaagagacaattccaagaacacgctgtatctgcaaatgaacagcctgagaggtgaggacacggcggtgtattactgtgcgagagtttattatggttcggggatttattataaaaaccgctactactacggtatggacgtctggggccaagggaccacggtcgccgtctcctcagcctccaccaagggcccatcggtcttccccctggcaccctcctccaagagcacctctgggggcacagcggccctgggctgcctggtcaaggactacttccccgaaccggtgacggtgtcgtggaactcaggcgccctgaccagcggcgtgcacaccttcccggctgtcctacagtcctcaggactctactccctcagcagcgtggtgaccgtgccctccagcagcttgggcacccagacctacatctgcaacgtgaatcacaagcccagcaacaccaaggtggacaagaaagttgagcccaaatcttgtgacaaaactcacacatgcccaccgtgcccagcacctgaactcctggggggaccgtcagtcttcctcttccccccaaaacccaaggacaccctcatgatctcccggacccctgaggtcacatgcgtggtggtggacgtgagccacgaagaccctgaggtcaagttcaactggtacgtggacggcgtggaggtgcataatgccaagacaaagccgcgggaggagcagtacaacagcacgtaccgtgtggtcagcgtcctcaccgtcctgcaccaggactggctgaatggcaaggagtacaagtgcaaggtgtccaacaaagccctcccagcccccatcgagaaaaccatctccaaagccaaagggcagccccgagaaccacaggtgtacaccctgcccccatcccgggaggagatgaccaagaaccaggtcagcctgacctgcctggtcaaaggcttctatcccagcgacatcgccgtggagtgggagagcaatgggcagccggagaacaactacaagaccacgcctcccgtgctggactccgacggctccttcttcctctatagcaagctcaccgtggacaagagcaggtggcagcaggggaacgtcttctcatgctccgtgatgcatgaggctctgcacaaccactacacgcagaagagcctctccctgtctccgggcaaatag

SEQ ID NO: 1227 - DNA, 696 bp, synthetic construct
  misc_feature 1..696: note = Synthetic Peptide
  source 1..696: mol_type = other DNA
atggcctgggctctgctgctcctcaccctcctcactcagggcacagggtcctgggcctcctatgacctgactcagccactctcagtgtcagtggccctgggacagacggccaggattacctgtgggggaaacaacattggagataaaaatgtgcactggtaccagcagaagccaggccaggcccctgtgctggtcatctataggaataacgtccggccctctgggatccctgagcgattctctggctccaactcggggaacacggccaccctgaccatcagcagagcccaagccggggatgaggctgactattactgtcaggtgtgggacagcagcactgtggttttcggcggagggaccaagctgaccgtcctaggtcagcccaaggctgcaccctcggtcactctgttcccgccctcctctgaggagcttcaagccaacaaggccacactggtgtgtctcatcagtgacttctacccgggagccgtgacagtggcctggaaggcagatagcagccccgtcaaggcgggagtggaaaccaccacaccctccaaacaaagcaacaacaagtacgcggccagcagctatctgagcctgacgcctgagcagtggaagtcccacagaagctacagctgccaggtcacgcatgaagggagcaccgtggagaagacagtggcccctacagaatgttcatag

SEQ ID NO: 1228 - DNA, 1443 bp, synthetic construct
  misc_feature 1..1443: note = Synthetic Peptide
  source 1..1443: mol_type = other DNA
atggacatgagggtgcccgctcagctcctggggctcctgctgctgtggctgagaggtgcgcgctgtcaggtgcagctggtggaatctgggggaggcgtggtccagcctgggaggtccctgagactctcctgtgcagcctctgggctcaacttcagtaactttggcatgcactgggtccgccaggctccaggcaaggggctggactgggtggcagttatatcatatgatggaggtaataaatactatgcagactccgtgaagggccgattcaccgtctccagagacaattccaagaacacgctctttctgcaaatgaacagcctgagagctgaggacacggctctgtattactgtgcgaaagtttactatggctcgggcagttattataaaaagaggtactactacggtatggacgtctggggccaggggaccacggtcaccgtctcctcagcctccaccaagggcccatcggtcttccccctggcaccctcctccaagagcacctctgggggcacagcggccctgggctgcctggtcaaggactacttccccgaaccggtgacggtgtcgtggaactcaggcgccctgaccagcggcgtgcacaccttcccggctgtcctacagtcctcaggactctactccctcagcagcgtggtgaccgtgccctccagcagcttgggcacccagacctacatctgcaacgtgaatcacaagcccagcaacaccaaggtggacaagaaagttgagcccaaatcttgtgacaaaactcacacatgcccaccgtgcccagcacctgaactcctggggggaccgtcagtcttcctcttccccccaaaacccaaggacaccctcatgatctcccggacccctgaggtcacatgcgtggtggtggacgtgagccacgaagaccctgaggtcaagttcaactggtacgtggacggcgtggaggtgcataatgccaagacaaagccgcgggaggagcagtacaacagcacgtaccgtgtggtcagcgtcctcaccgtcctgcaccaggactggctgaatggcaaggagtacaagtgcaaggtgtccaacaaagccctcccagcccccatcgagaaaaccatctccaaagccaaagggcagccccgagaaccacaggtgtacaccctgcccccatcccgggaggagatgaccaagaaccaggtcagcctgacctgcctggtcaaaggcttctatcccagcgacatcgccgtggagtgggagagcaatgggcagccggagaacaactacaagaccacgcctcccgtgctggactccgacggctccttcttcctctatagcaagctcaccgtggacaagagcaggtggcagcaggggaacgtcttctcatgctccgtgatgcatgaggctctgcacaaccactacacgcagaagagcctctccctgtctccgggcaaatag

SEQ ID NO: 1229 - DNA, 696 bp, synthetic construct
  misc_feature 1..696: note = Synthetic Peptide
  source 1..696: mol_type = other DNA
atggcctgggctctgctgctcctcaccctcctcactcagggcacagggtcctgggcctcctatgagctgactcagccactctcagtgtcagtggccctgggacagacggccaggattacctgtgggggaaacaacattggaagtaaaaatgtgcactggtaccagcagaagccaggccaggcccctgtgctggtcatctatagggatagcaaccggccctctgggatccctgagcgattctctggctccaagtcggggaacacggccaccctgaccatcagcagagcccaagccggggatgaggctgactattactgtcaggtgtgggacagcagcactgtggttttcggcggaggggccaagctgaccgtcctaggtcagcccaaggctgcaccctcggtcactctgttcccgccctcctctgaggagcttcaagccaacaaggccacactggtgtgtctcatcagtgacttctacccgggagccgtgacagtggcctggaaggcagatagcagccccgtcaaggcgggagtggaaaccaccacaccctccaaacaaagcaacaacaagtacgcggccagcagctatctgagcctgacgcctgagcagtggaagtcccacagaagctacagctgccaggtcacgcatgaagggagcaccgtggagaagacagtggcccctacagaatgttcatag

SEQ ID NO: 1230 - DNA, 1443 bp, synthetic construct
  misc_feature 1..1443: note = Synthetic Peptide
  source 1..1443: mol_type = other DNA
atggacatgagggtgcccgctcagctcctggggctcctgctgctgtggctgagaggtgcgcgctgtcaggtgcagctggtggagtctgggggaggcgtggtccagcctgggaggtccctgagactctcctgtgcagcctctggattcaacttcagtagctgtggcatgcactgggtccgccaggctccaggcaaggggctggagtgggtggcagttatatcatatgatggaactaataaatactatgcggactccgtgaagggccgattcaccatctccagagacaattccaagaacacgctgtatctgcaaatgaacagcctgagagctgaggacacggctgtgtattactgtgcgaaagtttactatggttcgggtatttattataaaaagaactactactacggtatggacgtctggggccaagggaccacggtcaccgtctcctcagcctccaccaagggcccatcggtcttccccctggcaccctcctccaagagcacctctgggggcacagcggccctgggctgcctggtcaaggactacttccccgaaccggtgacggtgtcgtggaactcaggcgccctgaccagcggcgtgcacaccttcccggctgtcctacagtcctcaggactctactccctcagcagcgtggtgaccgtgccctccagcagcttgggcacccagacctacatctgcaacgtgaatcacaagcccagcaacaccaaggtggacaagaaagttgagcccaaatcttgtgacaaaactcacacatgcccaccgtgcccagcacctgaactcctggggggaccgtcagtcttcctcttccccccaaaacccaaggacaccctcatgatctcccggacccctgaggtcacatgcgtggtggtggacgtgagccacgaagaccctgaggtcaagttcaactggtacgtggacggcgtggaggtgcataatgccaagacaaagccgcgggaggagcagtacaacagcacgtaccgtgtggtcagcgtcctcaccgtcctgcaccaggactggctgaatggcaaggagtacaagtgcaaggtgtccaacaaagccctcccagcccccatcgagaaaaccatctccaaagccaaagggcagccccgagaaccacaggtgtacaccctgcccccatcccgggaggagatgaccaagaaccaggtcagcctgacctgcctggtcaaaggcttctatcccagcgacatcgccgtggagtgggagagcaatgggcagccggagaacaactacaagaccacgcctcccgtgctggactccgacggctccttcttcctctatagcaagctcaccgtggacaagagcaggtggcagcaggggaacgtcttctcatgctccgtgatgcatgaggctctgcacaaccactacacgcagaagagcctctccctgtctccgggcaaatag

SEQ ID NO: 1231 - DNA, 1404 bp, synthetic construct
  misc_feature 1..1404: note = Synthetic Peptide
  source 1..1404: mol_type = other DNA
atggacatgagggtgcccgctcagctcctggggctcctgctgctgtggctgagaggtgcgcgctgtgaggtgcagctggtggagtctgggggaggcttggtaaagcctggggggtccctgagactctcctgtgcagcctctggatttactttcagtaacgcccggatgggctgggtccgccaggctccagggaaggggctggagtgggttggccgtattaaaagcaaaactgaaggtgggacaagagactacgctgcacccgtgaaaggcagattcaccatctcaagagatgattcaaaaaacacgctgtatctgcaaatgaacagcctgaaaaccgaggacacagccgtgtattattgtacctcgtatagtggggtctggggccaagggacaatggtcaccgtctcttcagcctccaccaagggcccatcggtcttccccctggcaccctcctccaagagcacctctgggggcacagcggccctgggctgcctggtcaaggactacttccccgaaccggtgacggtgtcgtggaactcaggcgccctgaccagcggcgtgcacaccttcccggctgtcctacagtcctcaggactctactccctcagcagcgtggtgaccgtgccctccagcagcttgggcacccagacctacatctgcaacgtgaatcacaagcccagcaacaccaaggtggacaagaaagttgagcccaaatcttgtgacaaaactcacacatgcccaccgtgcccagcacctgaactcctggggggaccgtcagtcttcctcttccccccaaaacccaaggacaccctcatgatctcccggacccctgaggtcacatgcgtggtggtggacgtgagccacgaagaccctgaggtcaagttcaactggtacgtggacggcgtggaggtgcataatgccaagacaaagccgcgggaggagcagtacaacagcacgtaccgtgtggtcagcgtcctcaccgtcctgcaccaggactggctgaatggcaaggagtacaagtgcaaggtgtccaacaaagccctcccagcccccatcgagaaaaccatctccaaagccaaagggcagccccgagaaccacaggtgtacaccctgcccccatcccgggaggagatgaccaagaaccaggtcagcctgacctgcctggtcaaaggcttctatcccagcgacatcgccgtggagtgggagagcaatgggcagccggagaacaactacaagaccacgcctcccgtgctggactccgacggctccttcttcctctatagcaagctcaccgtggacaagagcaggtggcagcaggggaacgtcttctcatgctccgtgatgcatgaggctctgcacaaccactacacgcagaagagcctctccctgtctccgggcaaatag

SEQ ID NO: 1232 - DNA, 729 bp, synthetic construct
  misc_feature 1..729: note = Synthetic Peptide
  source 1..729: mol_type = other DNA
atggacatgagggtgcccgctcagctcctggggctcctgctgctgtggctgagaggtgcgcgctgtgacatcgtgatgacccagtctccagactccctggctgtgtctctgggcgagagggccaccatcaactgcaagtccagccagagtgttttatacagttccaacaataagaactacttagcttggtaccatcagaaaccaggacagtctcctaagctgctcatttcctgggcatctacccgggaatccggggtccctgaccgattcagtggcagcgggtctgggacagatttcactctcaccatcaacagcctgcaggctgaagatgtggcagtttattactgtcaacaatattatagtattccgatcactttcggcggagggaccaaggtggagatcaaacgaacggtggctgcaccatctgtcttcatcttcccgccatctgatgagcagttgaaatctggaactgcctctgttgtgtgcctgctgaataacttctatcccagagaggccaaagtacagtggaaggtggataacgccctccaatcgggtaactcccaggagagtgtcacagagcaggacagcaaggacagcacctacagcctcagcagcaccctgacgctgagcaaagcagactacgagaaacacaaagtctacgcctgcgaagtcacccatcagggcctgagctcgcccgtcacaaagagcttcaacaggggagagtgttag

SEQ ID NO: 1233 - skipped

SEQ ID NO: 1234 - protein, 7 aa, synthetic construct
  REGION 1..7: note = Synthetic Peptide
  VARIANT 2: note = X = A, N, D, S, or Q
  VARIANT 3: note = X = S, T, N, I, F, or A
  VARIANT 4: note = X = N or V
RXXXRPS

SEQ ID NO: 1235 - protein, 17 aa, synthetic construct
  REGION 1..17: note = Synthetic Peptide
  VARIANT 13: note = X = K or R
KSSQSVLYSSNNXNYLA

SEQ ID NO: 1236 - protein, 114 aa, synthetic construct
  REGION 1..114: note = Synthetic Peptide
  VARIANT 36: note = X = K or R
  VARIANT 43: note = X = H or Q
  VARIANT 49: note = X = S or P
DIVMTQSPDSLAVSLGERATINCKSSQSVLYSSNNXNYLAWYXQKPGQXPKLLISWASTRESGVPDRFSGSGSGTDFTLTINSLQAEDVAVYYCQQYYSIPITFGGGTKVEIKR

SEQ ID NO: 1237 - protein, 444 aa, synthetic construct; identical to SEQ ID NO: 573
  REGION 1..444: note = Synthetic Peptide

SEQ ID NO: 1238 - protein, 457 aa, synthetic construct
  REGION 1..457: note = Synthetic Peptide
QVQLVESGGGVVQPGRSLRLSCAASGFTFSNYGFHWVRQTPGKGLEWVAVISYDGSNRYYASSVKGRFTISRDNSKNTLYLQMNSLRGEDTALYYCARVYYGSGTYYKNRYYYGMDVWGQGTTVTVSSASTKGPSVFPLAPSSKSTSGGTAALGCLVKDYFPEPVTVSWNSGALTSGVHTFPAVLQSSGLYSLSSVVTVPSSSLGTQTYICNVNHKPSNTKVDKKVEPKSCDKTHTCPPCPAPELLGGPSVFLFPPKPKDTLMISRTPEVTCVVVDVSHEDPEVKFNWYVDGVEVHNAKTKPREEQYNSTYRVVSVLTVLHQDWLNGKEYKCKVSNKALPAPIEKTISKAKGQPREPQVYTLPPSREEMTKNQVSLTCLVKGFYPSDIAVEWESNGQPENNYKTTPPVLDSDGSFFLYSKLTVDKSRWQQGNVFSCSVMHEALHNHYTQKSLSLSPG

SEQ ID NO: 1239 - protein, 457 aa, synthetic construct
  REGION 1..457: note = Synthetic Peptide
QVQLVESGGGVVQPGRSLRLSCAASGFTFSNYGFHWVRQTPGKGLEWVAVISYAGSNRYYAASVKGRFTISRDNSKNTLYLQMNSLRGEDTALYYCARVYYGSGTYYKNRYYYGMDVWGQGTTVTVSSASTKGPSVFPLAPSSKSTSGGTAALGCLVKDYFPEPVTVSWNSGALTSGVHTFPAVLQSSGLYSLSSVVTVPSSSLGTQTYICNVNHKPSNTKVDKKVEPKSCDKTHTCPPCPAPELLGGPSVFLFPPKPKDTLMISRTPEVTCVVVDVSHEDPEVKFNWYVDGVEVHNAKTKPREEQYNSTYRVVSVLTVLHQDWLNGKEYKCKVSNKALPAPIEKTISKAKGQPREPQVYTLPPSREEMTKNQVSLTCLVKGFYPSDIAVEWESNGQPENNYKTTPPVLDSDGSFFLYSKLTVDKSRWQQGNVFSCSVMHEALHNHYTQKSLSLSPG

SEQ ID NO: 1240 - protein, 457 aa, synthetic construct
  REGION 1..457: note = Synthetic Peptide
QVQLVESGGGVVQPGRSLRLSCAASGFTFSNYGFHWVRQTPGKGLEWVAVISYSGSNRYYADSVKGRFTISRDNSKNTLYLQMNSLRGEDTALYYCARVYYGSGTYYKNRYYYGMDVWGQGTTVTVSSASTKGPSVFPLAPSSKSTSGGTAALGCLVKDYFPEPVTVSWNSGALTSGVHTFPAVLQSSGLYSLSSVVTVPSSSLGTQTYICNVNHKPSNTKVDKKVEPKSCDKTHTCPPCPAPELLGGPSVFLFPPKPKDTLMISRTPEVTCVVVDVSHEDPEVKFNWYVDGVEVHNAKTKPREEQYNSTYRVVSVLTVLHQDWLNGKEYKCKVSNKALPAPIEKTISKAKGQPREPQVYTLPPSREEMTKNQVSLTCLVKGFYPSDIAVEWESNGQPENNYKTTPPVLDSDGSFFLYSKLTVDKSRWQQGNVFSCSVMHEALHNHYTQKSLSLSPG

SEQ ID NO: 1241 - protein, 457 aa, synthetic construct
  REGION 1..457: note = Synthetic Peptide
QVQLVESGGGVAQPGRSLRLSCAASGFNFSNCGMHWVRQAPGKGLEWVAVISYDGGNKYHADSVKGRFTISRDDSKNTLYLQMDSLRTEDTAVYYCAKVYYGSGIYYKNRYYYGMDVWGQGTTVTVSSASTKGPSVFPLAPSSKSTSGGTAALGCLVKDYFPEPVTVSWNSGALTSGVHTFPAVLQSSGLYSLSSVVTVPSSSLGTQTYICNVNHKPSNTKVDKKVEPKSCDKTHTCPPCPAPELLGGPSVFLFPPKPKDTLMISRTPEVTCVVVDVSHEDPEVKFNWYVDGVEVHNAKTKPREEQYNSTYRVVSVLTVLHQDWLNGKEYKCKVSNKALPAPIEKTISKAKGQPREPQVYTLPPSREEMTKNQVSLTCLVKGFYPSDIAVEWESNGQPENNYKTTPPVLDSDGSFFLYSKLTVDKSRWQQGNVFSCSVMHEALHNHYTQKSLSLSPG

SEQ ID NO: 1242 - protein, 457 aa, synthetic construct
  REGION 1..457: note = Synthetic Peptide
QVQLVESGGGVAQPGRSLRLSCAASGFNFSNCGMHWVRQAPGKGLEWVAVISYDGGNKYYADSVKGRFTISRDDSKNTLYLQMDSLRTEDTAVYYCAKVYYGSGIYYKNRYYYGMDVWGQGTTVTVSSASTKGPSVFPLAPSSKSTSGGTAALGCLVKDYFPEPVTVSWNSGALTSGVHTFPAVLQSSGLYSLSSVVTVPSSSLGTQTYICNVNHKPSNTKVDKKVEPKSCDKTHTCPPCPAPELLGGPSVFLFPPKPKDTLMISRTPEVTCVVVDVSHEDPEVKFNWYVDGVEVHNAKTKPREEQYNSTYRVVSVLTVLHQDWLNGKEYKCKVSNKALPAPIEKTISKAKGQPREPQVYTLPPSREEMTKNQVSLTCLVKGFYPSDIAVEWESNGQPENNYKTTPPVLDSDGSFFLYSKLTVDKSRWQQGNVFSCSVMHEALHNHYTQKSLSLSPG

SEQ ID NO: 1243 - protein, 457 aa, synthetic construct
  REGION 1..457: note = Synthetic Peptide
QVQLVESGGGVVQPGRSLRLSCVVSGFNFSNNGMHWVRQAPGKGLEWVAVISNDGSNKYYADSVRGRFTISRDNSKNTLYLQMNSLRAEDTAVYSCAKVYYGSGIYYKNNYYYGMDVWGQGTTVTVSSASTKGPSVFPLAPSSKSTSGGTAALGCLVKDYFPEPVTVSWNSGALTSGVHTFPAVLQSSGLYSLSSVVTVPSSSLGTQTYICNVNHKPSNTKVDKKVEPKSCDKTHTCPPCPAPELLGGPSVFLFPPKPKDTLMISRTPEVTCVVVDVSHEDPEVKFNWYVDGVEVHNAKTKPREEQYNSTYRVVSVLTVLHQDWLNGKEYKCKVSNKALPAPIEKTISKAKGQPREPQVYTLPPSREEMTKNQVSLTCLVKGFYPSDIAVEWESNGQPENNYKTTPPVLDSDGSFFLYSKLTVDKSRWQQGNVFSCSVMHEALHNHYTQKSLSLSPG

SEQ ID NO: 1244 - protein, 457 aa, synthetic construct
  REGION 1..457: note = Synthetic Peptide
QVQLVESGGGVVQPGRSLRLSCAASGFNFNTYGMHWVRQAPGKGLEWVAVISYDGSNKYYADSVKGRFTISRDNSKSTLYLQMNSLRAEDTAVYYCARVYYGSGSYYKKNYYYGMDVWGQGTTVTVSSASTKGPSVFPLAPSSKSTSGGTAALGCLVKDYFPEPVTVSWNSGALTSGVHTFPAVLQSSGLYSLSSVVTVPSSSLGTQTYICNVNHKPSNTKVDKKVEPKSCDKTHTCPPCPAPELLGGPSVFLFPPKPKDTLMISRTPEVTCVVVDVSHEDPEVKFNWYVDGVEVHNAKTKPREEQYNSTYRVVSVLTVLHQDWLNGKEYKCKVSNKALPAPIEKTISKAKGQPREPQVYTLPPSREEMTKNQVSLTCLVKGFYPSDIAVEWESNGQPENNYKTTPPVLDSDGSFFLYSKLTVDKSRWQQGNVFSCSVMHEALHNHYTQKSLSLSPG

SEQ ID NO: 1245 - protein, 457 aa, synthetic construct
  REGION 1..457: note = Synthetic Peptide
QVQVVESGGGVVQPGRSLRLSCAASGFTLSSYGFHWVRQTPGKGLEWVAVISYDGSNKYYADSVKGRFTISRDNSKNTLYLQMNSLRGEDTAVYYCARVYYGSGTYYKNRYYYGMDVWGQGTTVTVSSASTKGPSVFPLAPSSKSTSGGTAALGCLVKDYFPEPVTVSWNSGALTSGVHTFPAVLQSSGLYSLSSVVTVPSSSLGTQTYICNVNHKPSNTKVDKKVEPKSCDKTHTCPPCPAPELLGGPSVFLFPPKPKDTLMISRTPEVTCVVVDVSHEDPEVKFNWYVDGVEVHNAKTKPREEQYNSTYRVVSVLTVLHQDWLNGKEYKCKVSNKALPAPIEKTISKAKGQPREPQVYTLPPSREEMTKNQVSLTCLVKGFYPSDIAVEWESNGQPENNYKTTPPVLDSDGSFFLYSKLTVDKSRWQQGNVFSCSVMHEALHNHYTQKSLSLSPG

SEQ ID NO: 1246 - protein, 457 aa, synthetic construct
  REGION 1..457: note = Synthetic Peptide
QVQLVESGGGVVQPGRSLRLSCVVSGFNFINNGMHWVRQAPGKGLDWVAVISNDGSNKYYPDSVKGRFTISRDNSKNTLYLQMNSLRAEDSAVYYCAKVYYGSGNYYKNNYYYGMDVWGQGTTVTVSSASTKGPSVFPLAPSSKSTSGGTAALGCLVKDYFPEPVTVSWNSGALTSGVHTFPAVLQSSGLYSLSSVVTVPSSSLGTQTYICNVNHKPSNTKVDKKVEPKSCDKTHTCPPCPAPELLGGPSVFLFPPKPKDTLMISRTPEVTCVVVDVSHEDPEVKFNWYVDGVEVHNAKTKPREEQYNSTYRVVSVLTVLHQDWLNGKEYKCKVSNKALPAPIEKTISKAKGQPREPQVYTLPPSREEMTKNQVSLTCLVKGFYPSDIAVEWESNGQPENNYKTTPPVLDSDGSFFLYSKLTVDKSRWQQGNVFSCSVMHEALHNHYTQKSLSLSPG

SEQ ID NO: 1247 - protein, 457 aa, synthetic construct
  REGION 1..457: note = Synthetic Peptide
QMQVVESGGGVVQPGRSLRLSCAASGFTFSSSGMHWVRQAPGKGLEWVAVISHDGSNKYYADSVKGRFTISRDNSKNTLYLQMNSLGGEDTAVYYCAKVYYGSGIYYKNRYYYGMDVWGQGTTVIVSSASTKGPSVFPLAPSSKSTSGGTAALGCLVKDYFPEPVTVSWNSGALTSGVHTFPAVLQSSGLYSLSSVVTVPSSSLGTQTYICNVNHKPSNTKVDKKVEPKSCDKTHTCPPCPAPELLGGPSVFLFPPKPKDTLMISRTPEVTCVVVDVSHEDPEVKFNWYVDGVEVHNAKTKPREEQYNSTYRVVSVLTVLHQDWLNGKEYKCKVSNKALPAPIEKTISKAKGQPREPQVYTLPPSREEMTKNQVSLTCLVKGFYPSDIAVEWESNGQPENNYKTTPPVLDSDGSFFLYSKLTVDKSRWQQGNVFSCSVMHEALHNHYTQKSLSLSPG

SEQ ID NO: 1248 - protein, 457 aa, synthetic construct
  REGION 1..457: note = Synthetic Peptide
QVQLVESGGGVAQPGRSLRLSCAASGFNFSDCGMHWVRQAPGKGLEWVAVISYDGGNKYYADSVKGRFTISRDDSKNTLYLQTDSLRTEDTAVYYCAKVYYGSGIYYKNRYYYGMDVWGQGTTVTVSSASTKGPSVFPLAPSSKSTSGGTAALGCLVKDYFPEPVTVSWNSGALTSGVHTFPAVLQSSGLYSLSSVVTVPSSSLGTQTYICNVNHKPSNTKVDKKVEPKSCDKTHTCPPCPAPELLGGPSVFLFPPKPKDTLMISRTPEVTCVVVDVSHEDPEVKFNWYVDGVEVHNAKTKPREEQYNSTYRVVSVLTVLHQDWLNGKEYKCKVSNKALPAPIEKTISKAKGQPREPQVYTLPPSREEMTKNQVSLTCLVKGFYPSDIAVEWESNGQPENNYKTTPPVLDSDGSFFLYSKLTVDKSRWQQGNVFSCSVMHEALHNHYTQKSLSLSPG

SEQ ID NO: 1249 - protein, 457 aa, synthetic construct
  REGION 1..457: note = Synthetic Peptide
QVQVVESGGGVVQPGRSLRLSCAASGFTFSSYGMHWVRQAPGKGLEWVAVISFDGNNKYYADSVKGRFTISRDNSKNTLYLQMNSLRGEDTAVYYCARVYYGSGSYYKNRYYYGMDVWGQGTTVTVSTASTKGPSVFPLAPSSKSTSGGTAALGCLVKDYFPEPVTVSWNSGALTSGVHTFPAVLQSSGLYSLSSVVTVPSSSLGTQTYICNVNHKPSNTKVDKKVEPKSCDKTHTCPPCPAPELLGGPSVFLFPPKPKDTLMISRTPEVTCVVVDVSHEDPEVKFNWYVDGVEVHNAKTKPREEQYNSTYRVVSVLTVLHQDWLNGKEYKCKVSNKALPAPIEKTISKAKGQPREPQVYTLPPSREEMTKNQVSLTCLVKGFYPSDIAVEWESNGQPENNYKTTPPVLDSDGSFFLYSKLTVDKSRWQQGNVFSCSVMHEALHNHYTQKSLSLSPG

SEQ ID NO: 1250 - protein, 457 aa, synthetic construct
  REGION 1..457: note = Synthetic Peptide
QVQLVESGGGVVQPGRSLRLSCAVSGFTFSSNGMHWVRQAPGKGLEWVAVISNDGSNKYYGDSVKGRFTISRDNSKNTLYLQMNSLRAEDTAVYYCAKVYYGSGIYYRNNYYYGMDVWGQGTTVTVSSASTKGPSVFPLAPSSKSTSGGTAALGCLVKDYFPEPVTVSWNSGALTSGVHTFPAVLQSSGLYSLSSVVTVPSSSLGTQTYICNVNHKPSNTKVDKKVEPKSCDKTHTCPPCPAPELLGGPSVFLFPPKPKDTLMISRTPEVTCVVVDVSHEDPEVKFNWYVDGVEVHNAKTKPREEQYNSTYRVVSVLTVLHQDWLNGKEYKCKVSNKALPAPIEKTISKAKGQPREPQVYTLPPSREEMTKNQVSLTCLVKGFYPSDIAVEWESNGQPENNYKTTPPVLDSDGSFFLYSKLTVDKSRWQQGNVFSCSVMHEALHNHYTQKSLSLSPG

SEQ ID NO: 1251 - protein, 457 aa, synthetic construct
  REGION 1..457: note = Synthetic Peptide
QVQVVESGGGVVQPGRSLRLSCGASGFTFSGYGMHWVRQAPGKGLEWVAVISYDGSNKYYADSVKGRFPISRDNSKNTLYLQMNSLRGEDTAVYYCARVYYGSGIYYKNRYYYGMDVWGQGTTVAVSSASTKGPSVFPLAPSSKSTSGGTAALGCLVKDYFPEPVTVSWNSGALTSGVHTFPAVLQSSGLYSLSSVVTVPSSSLGTQTYICNVNHKPSNTKVDKKVEPKSCDKTHTCPPCPAPELLGGPSVFLFPPKPKDTLMISRTPEVTCVVVDVSHEDPEVKFNWYVDGVEVHNAKTKPREEQYNSTYRVVSVLTVLHQDWLNGKEYKCKVSNKALPAPIEKTISKAKGQPREPQVYTLPPSREEMTKNQVSLTCLVKGFYPSDIAVEWESNGQPENNYKTTPPVLDSDGSFFLYSKLTVDKSRWQQGNVFSCSVMHEALHNHYTQKSLSLSPG

SEQ ID NO: 1252 - protein, 457 aa, synthetic construct
  REGION 1..457: note = Synthetic Peptide
QVQVVESGGGVVQPGRSLRLSCGASGFTFSGYGMHWVRQAPGKGLEWVAVISYDGSNKYYADSVKGRFTISRDNSKNTLYLQMNSLRGEDTAVYYCARVYYGSGIYYKNRYYYGMDVWGQGTTVAVSSASTKGPSVFPLAPSSKSTSGGTAALGCLVKDYFPEPVTVSWNSGALTSGVHTFPAVLQSSGLYSLSSVVTVPSSSLGTQTYICNVNHKPSNTKVDKKVEPKSCDKTHTCPPCPAPELLGGPSVFLFPPKPKDTLMISRTPEVTCVVVDVSHEDPEVKFNWYVDGVEVHNAKTKPREEQYNSTYRVVSVLTVLHQDWLNGKEYKCKVSNKALPAPIEKTISKAKGQPREPQVYTLPPSREEMTKNQVSLTCLVKGFYPSDIAVEWESNGQPENNYKTTPPVLDSDGSFFLYSKLTVDKSRWQQGNVFSCSVMHEALHNHYTQKSLSLSPG

SEQ ID NO: 1253 - protein, 457 aa, synthetic construct
  REGION 1..457: note = Synthetic Peptide
QVQLVESGGGVVQPGRSLRLSCAASGLNFSNFGMHWVRQAPGKGLDWVAVISYDGGNKYYADSVKGRFTVSRDNSKNTLFLQMNSLRAEDTALYYCAKVYYGSGSYYKKRYYYGMDVWGQGTTVTVSSASTKGPSVFPLAPSSKSTSGGTAALGCLVKDYFPEPVTVSWNSGALTSGVHTFPAVLQSSGLYSLSSVVTVPSSSLGTQTYICNVNHKPSNTKVDKKVEPKSCDKTHTCPPCPAPELLGGPSVFLFPPKPKDTLMISRTPEVTCVVVDVSHEDPEVKFNWYVDGVEVHNAKTKPREEQYNSTYRVVSVLTVLHQDWLNGKEYKCKVSNKALPAPIEKTISKAKGQPREPQVYTLPPSREEMTKNQVSLTCLVKGFYPSDIAVEWESNGQPENNYKTTPPVLDSDGSFFLYSKLTVDKSRWQQGNVFSCSVMHEALHNHYTQKSLSLSPG

SEQ ID NO: 1254 - protein, 457 aa, synthetic construct
  REGION 1..457: note = Synthetic Peptide
QVQLVESGGGVVQPGRSLRLSCAASGFNFSSCGMHWVRQAPGKGLEWVAVISYDGTNKYYADSVKGRFTISRDNSKNTLYLQMNSLRAEDTAVYYCAKVYYGSGIYYKKNYYYGMDVWGQGTTVTVSSASTKGPSVFPLAPSSKSTSGGTAALGCLVKDYFPEPVTVSWNSGALTSGVHTFPAVLQSSGLYSLSSVVTVPSSSLGTQTYICNVNHKPSNTKVDKKVEPKSCDKTHTCPPCPAPELLGGPSVFLFPPKPKDTLMISRTPEVTCVVVDVSHEDPEVKFNWYVDGVEVHNAKTKPREEQYNSTYRVVSVLTVLHQDWLNGKEYKCKVSNKALPAPIEKTISKAKGQPREPQVYTLPPSREEMTKNQVSLTCLVKGFYPSDIAVEWESNGQPENNYKTTPPVLDSDGSFFLYSKLTVDKSRWQQGNVFSCSVMHEALHNHYTQKSLSLSPG

We claim:

1. An antibody that binds to human C-C chemokine receptor type 8 (CCR8), or an antigen-binding fragment thereof, wherein said antibody or antigen-binding fragment thereof comprises:
(a) a heavy chain complementarity-determining region (HCDR) 1 amino acid sequence of SEQ ID NO: 839;
(b) an HCDR2 amino acid sequence of SEQ ID NO: 840,
(c) an HCDR3 amino acid sequence of SEQ ID NO: 841,
(d) a light chain complementarity-determining region (LCDR) 1 amino acid sequence of KSSQSVLYSSNNX₁NYLA (SEQ ID NO: 1235), wherein X₁ is K or R,
(e) an LCDR2 amino acid sequence of SEQ ID NO: 843, and
(f) an LCDR3 amino acid sequence of SEQ ID NO: 844.

2. The antibody or antigen binding fragment of claim 1, which comprises an LCDR1 amino acid sequence of SEQ ID NO: 4 or SEQ ID NO: 842.

3. The antibody or antigen binding fragment of claim 1, which comprises a heavy chain variable region (HCVR) amino acid sequence of SEQ ID NO: 13, and a light chain variable region (LCVR) comprising the amino acid sequence:
DIVMTQSPDSLAVSLGERATINCKSSQSVLYSSNNX₁NYLAWYX₂QKPGQX₃PKLLIS WASTRESGVPDRFSGSGSGTDFTLTINSLQAEDVAVYYCQQYYSIPITFGGGTKVEIK R (SEQ ID NO: 1236), wherein X₁ is K or R, X₂ is H or Q, and/or X₃ is S or P.

4. The antibody or antigen-binding fragment of claim 1, which comprises a heavy chain variable region (HCVR) amino acid sequence of SEQ ID NO: 1017 and a light chain variable region (LCVR) amino acid sequence of SEQ ID NO: 1018.

5. The antibody or antigen-binding fragment of claim 1, which comprises a heavy chain (HC) amino acid sequence of SEQ ID NO: 1125 or SEQ ID NO: 1237 and a light chain (LC) amino acid sequence of SEQ ID NO: 1126.

6. The antibody or antigen-binding fragment of claim 1, which comprises two HCs and two LCs, wherein both HCs comprise an amino acid sequence of SEQ ID NO: 1125 or SEQ ID NO: 1237, and both LCs comprise an amino acid sequence of SEQ ID NO: 1126.

7. An antibody that binds to human CCR8, or an antigen-binding fragment thereof, wherein the antibody comprises:
(a) an HCDR1 amino acid sequence of X₁X₂GX₄H, (SEQ ID NO: 1233), wherein (i) X₁ is N, S, D, G, T, or R, (ii) X₂ is C, N, Y, S, or F, and (iii) X₄ is M or F;
(b) an HCDR2 amino acid sequence of SEQ ID NO: 648, 654, 660, 666, 672, 678, 684, 690, 696, 702, 708, 714, 720, 726, 732, 738, 744, 750, 756, 762, 768, 774, 780, 786, 792, 798, 804, 810, 816, 822, 828, 834, 840, 846, 852, 858, 867, 873, 879, 885, 891, 897, 903, 909, 915, 921, 927, 933, 939, or 945, or a variant thereof that comprises 1-4 amino acid substitutions or is at least 90% identical to any of the foregoing HCDR2 amino acid sequences;
(c) an HCDR3 amino acid sequence of SEQ ID NO: 649, 655, 661, 667, 673, 679, 685, 691, 697, 703, 709, 715, 721, 727, 733, 739, 745, 751, 757, 763, 769, 775, 781, 787, 793, 799, 805, 811, 817, 823, 829, 835, 847, 853, 859, 868, 874, 880, 886, 892, 898, 904, 910, 916, 922, 928, 934, 940, or 946, or a variant thereof that comprises 1-4 amino acid substitutions or is at least 90% identical to any of the foregoing HCDR3 amino acid sequences;
(d) an LCDR1 amino acid sequence of SEQ ID NO: 650, 656, 662, 668, 674, 680, 686, 692, 698, 704, 710, 716, 722, 728, 734, 740, 746, 752, 758, 764, 770, 776, 782, 788, 794, 800, 806, 812, 818, 824, 830, 836, 848, 854, 860, 863, 869, 875, 881, 887, 893, 899, 905, 911, 917, 923, 929, 935, or 941, or a variant thereof that comprises 1-4 amino acid substitutions or is at least 90% identical to any of the foregoing LCDR1 amino acid sequences;
(e) an LCDR2 amino acid sequence of RX₂X₃X₄RPS (SEQ ID NO: 1234), wherein (i) X₂ is A, N, D, S, or Q, (ii) X₃ is S, T, N, I, F, or A, and (iii) X₄ is N or V; and
(f) an LCDR3 amino acid sequence of SEQ ID NO: 652, 658, 664, 670, 676, 682, 688, 694, 700, 706, 712, 718, 724, 730, 736, 742, 748, 754, 760, 766, 772, 778, 784, 790, 796, 802, 808, 814, 820, 826, 832, 838, 850, 856, 862, 865, 871, 877, 883, 889, 895, 901, 907, 913, 919, 925, 931, 937, or 943, or a variant thereof that comprises 1-4 amino acid substitutions or is at least 90% identical to any of the foregoing LCDR3 amino acid sequences.

8. The antibody or antigen-binding fragment of claim 7, which comprises an HCDR1 amino acid sequence of SEQ ID NO: 647, 653, 659, 665, 671, 677, 683, 689, 695, 701, 707, 713, 719, 725, 731, 737, 743, 749, 755, 761, 767, 773, 779, 785, 791, 797, 803, 809, 815, 821, 827, 833, 845, 851, 857, 866, 872, 878, 884, 890, 896, 902, 908, 914, 920, 926, 932, 938, or 944.

9. The antibody or antigen-binding fragment of claim 7, which comprises an LCDR2 amino acid sequence of SEQ ID NO: 651, 657, 663, 669, 675, 681, 687, 693, 699, 705, 711, 717, 723, 729, 735, 741, 747, 753, 759, 765, 771, 777, 783, 789, 795, 801, 807, 813, 819, 825, 831, 837 849, 855, 861, 864, 870, 876, 882, 888, 894, 900, 906, 912, 918, 924, 930, 936, or 942.

10. The antibody or antigen-binding fragment of claim 7, which comprises a HCVR amino acid sequence comprising SEQ ID NO: 953, 955, 957, 959, 961, 963, 965, 967, 969, 971, 973, 975, 977, 979, 981, 983, 985, 987, 989, 991, 993, 995, 997, 999, 1001, 1003, 1005, 1007, 1009, 1011, 1013, 1015, 1019, 1021, 1023, 1026, 1028, 1030, 1032, 1034, 1036, 1038, 1040, 1042, 1044, 1046, 1048, 1050, or 1052, or an amino acid sequence that is at least 90% identical to any of the foregoing HCVR amino acid sequences.

11. The antibody or antigen-binding fragment of claim 7, which comprises a LCVR amino acid sequence comprising SEQ ID NO: 964, 966, 968, 970, 972, 974, 976, 978, 980, 982, 984, 986, 988, 990, 992, 994, 996, 998, 1000, 1002, 1004, 1006, 1008, 1010, 1012, 1014, 1016, 1020, 1022, 1024, 1025, 1027, 1029, 1031, 1033, 1035, 1037, 1039, 1041, 1043, 1045, 1047, 1049, or 1051, or an amino acid sequence that is at least 90% identical to any of the foregoing LCVR amino acid sequences.

12. The antibody of or antigen-binding fragment of claim 7, which comprises:
(a) a HCVR comprising an amino acid sequence of SEQ ID NO: 1019 and a LCVR comprising an amino acid sequence of SEQ ID NO: 1020;
(b) a HCVR comprising an amino acid sequence of SEQ ID NO: 1021 and a LCVR comprising an amino acid sequence of SEQ ID NO: 1022;
(c) a HCVR comprising an amino acid sequence of SEQ ID NO: 1023 and a LCVR comprising an amino acid sequence of SEQ ID NO: 1024;
(d) a HCVR comprising an amino acid sequence of SEQ ID NO: 1026 and a LCVR comprising an amino acid sequence of SEQ ID NO: 1025;
(e) a HCVR comprising an amino acid sequence of SEQ ID NO: 1028 and a LCVR comprising an amino acid sequence of SEQ ID NO: 1027;
(f) a HCVR comprising an amino acid sequence of SEQ ID NO: 1030 and a LCVR comprising an amino acid sequence of SEQ ID NO: 1029;
(g) a HCVR comprising an amino acid sequence of SEQ ID NO: 1032 and a LCVR comprising an amino acid sequence of SEQ ID NO: 1031;
(h) a HCVR comprising an amino acid sequence of SEQ ID NO: 1034 and a LCVR comprising an amino acid sequence of SEQ ID NO: 1033;
(i) a HCVR comprising an amino acid sequence of SEQ ID NO: 1036 and a LCVR comprising an amino acid sequence of SEQ ID NO: 1035;
(j) a HCVR comprising an amino acid sequence of SEQ ID NO: 1038 and a LCVR comprising an amino acid sequence of SEQ ID NO: 1037;
(k) a HCVR comprising an amino acid sequence of SEQ ID NO: 1040 and a LCVR comprising an amino acid sequence of SEQ ID NO: 1039;
(l) a HCVR comprising an amino acid sequence of SEQ ID NO: 1042 and a LCVR comprising an amino acid sequence of SEQ ID NO: 1041;
(m) a HCVR comprising an amino acid sequence of SEQ ID NO: 1044 and a LCVR comprising an amino acid sequence of SEQ ID NO: 1043;
(n) a HCVR comprising an amino acid sequence of SEQ ID NO: 1046 and a LCVR comprising an amino acid sequence of SEQ ID NO: 1045;
(o) a HCVR comprising an amino acid sequence of SEQ ID NO: 1048 and a LCVR comprising an amino acid sequence of SEQ ID NO: 1047;
(p) a HCVR comprising an amino acid sequence of SEQ ID NO: 1050 and a LCVR comprising an amino acid sequence of SEQ ID NO: 1049; or
(q) a HCVR comprising an amino acid sequence of SEQ ID NO: 1052 and a LCVR comprising an amino acid sequence of SEQ ID NO: 1051.

13. The antibody or antigen-binding fragment of claim 7, which comprises a HC amino acid sequence of SEQ ID NO: 1127, 1129, 1131, 1134, 1136, 1138, 1140, 1142, 1144, 1146, 1148, 1150, 1152, 1154, 1156, 1158, 1160, 1238, 1239, 1240, 1241, 1242, 1243, 1244, 1245, 1246, 1247, 1248, 1249, 1250, 1251, 1252, 1253, or 1254, or an amino acid sequence that is at least 90% identical to any of the foregoing HC amino acid sequences.

14. The antibody or antigen-binding fragment of claim 7, which comprises a LC amino acid sequence of SEQ ID NO: 1128, 1130, 1132, 1133, 1135, 1137, 1139, 1141, 1143, 1145, 1147, 1149, 1151, 1153, 1155, 1157, or 1159, or an amino acid sequence that is at least 90% identical to any of the foregoing LC amino acid sequences.

15. The antibody or antigen-binding fragment of claim 7, which comprises:
(a) an HC amino acid sequence of SEQ ID NO: 1127 or SEQ ID NO: 1238 and a LC amino acid sequence of SEQ ID NO: 1128;
(b) an HC amino acid sequence of SEQ ID NO: 1129 or SEQ ID NO: 1239 and a LC amino acid sequence of SEQ ID NO: 1130;
(c) an HC amino acid sequence of SEQ ID NO: 1131 or SEQ ID NO: 1240 and a LC amino acid sequence of SEQ ID NO: 1132;
(d) an HC amino acid sequence of SEQ ID NO: 1134 or SEQ ID NO: 1241 and a LC amino acid sequence of SEQ ID NO: 1133;
(e) an HC amino acid sequence of SEQ ID NO: 1136 or SEQ ID NO: 1242 and a LC amino acid sequence of SEQ ID NO: 1135;
(f) an HC amino acid sequence of SEQ ID NO: 1138 or SEQ ID NO: 1243 and a LC amino acid sequence of SEQ ID NO: 1137;
(g) an HC amino acid sequence of SEQ ID NO: 1140 or SEQ ID NO: 1244 and a LC amino acid sequence of SEQ ID NO: 1139;
(h) an HC amino acid sequence of SEQ ID NO: 1142 or SEQ ID NO: 1245 and a LC amino acid sequence of SEQ ID NO: 1141;
(i) an HC amino acid sequence of SEQ ID NO: 1144 or SEQ ID NO: 1246 and a LC amino acid sequence of SEQ ID NO: 1143;
(j) an HC amino acid sequence of SEQ ID NO: 1146 or SEQ ID NO: 1247 and a LC amino acid sequence of SEQ ID NO: 1145;
(k) an HC amino acid sequence of SEQ ID NO: 1148 or SEQ ID NO: 1248 and a LC amino acid sequence of SEQ ID NO: 1147;
(l) an HC amino acid sequence of SEQ ID NO: 1150 or SEQ ID NO: 1249 and a LC amino acid sequence of SEQ ID NO: 1149;
(m) an HC amino acid sequence of SEQ ID NO: 1152 or SEQ ID NO: 1250 and a LC amino acid sequence of SEQ ID NO: 1151;
(n) an HC amino acid sequence of SEQ ID NO: 1154 or SEQ ID NO: 1251 and a LC amino acid sequence of SEQ ID NO: 1153;
(o) an HC amino acid sequence of SEQ ID NO: 1156 or SEQ ID NO: 1252 and a LC amino acid sequence of SEQ ID NO: 1155;
(p) an HC amino acid sequence of SEQ ID NO: 1158 or SEQ ID NO: 1253 and a LC amino acid sequence of SEQ ID NO: 1157; or
(q) an HC amino acid sequence of SEQ ID NO: 1160 or SEQ ID NO: 1254 and a LC amino acid sequence of SEQ ID NO: 1159.

16. The antibody of or antigen-binding fragment claim 7, which is a single chain variable fragment (scFv) comprising an amino acid sequence of SEQ ID NO: 1093, 1094, 1095, 1096, 1097, 1098, 1099, 1100, 1101, 1102, 1103, 1104, 1105, 1106, 1107, 1108, 1109, 1110, 1111, 1112, 1113, 1114, 1115, 1116, 1117, 1118, 1119, 1120, 1121, 1122, 1123, or 1124.

17. The antibody of or antigen-binding fragment claim 7, which comprises an HCDR1 amino acid sequence of SEQ ID NO: 857, an HCDR2 amino acid sequence of SEQ ID NO: 858, an HCDR3 amino acid sequence of SEQ ID NO: 859, an LCDR1 amino acid sequence of SEQ ID NO: 860, an LCDR2 amino acid sequence of SEQ ID NO: 861, and an LCDR3 amino acid sequence of SEQ ID NO: 862.

18. The antibody or antigen-binding fragment of claim 1, which is an antibody.

19. The antibody or antigen-binding fragment of claim 7, which is an antibody.

20. The antibody or antigen-binding fragment of claim 1, which is an antigen-binding fragment of an antibody.

21. The antibody or antigen-binding fragment of claim 7, which is an antigen-binding fragment of an antibody.

22. The antibody or antigen-binding fragment of claim 1, which is an afucosylated antibody.

23. The antibody or antigen-binding fragment of claim 7, which is an afucosylated antibody.

24. A nucleic acid sequence encoding the antibody or antigen-binding fragment of claim 1.

25. A nucleic acid sequence encoding the antibody or antigen-binding fragment of claim 7.

26. A nucleic acid sequence encoding a heavy chain amino acid sequence of SEQ ID NO: 1125, 1127, 1129, 1131, 1134, 1136, 1138, 1140, 1142, 1144, 1146, 1148, 1150, 1152, 1154, 1156, 1158, 1160, 1238, 1239, 1240, 1241, 1242, 1243, 1244, 1245, 1246, 1247, 1248, 1249, 1250, 1251, 1252, 1253, or 1254.

27. A nucleic acid sequence encoding a light chain amino acid sequence of SEQ ID NO: 1126, 1128, 1130, 1132, 1133, 1135, 1137, 1139, 1141, 1143, 1145, 1147, 1149, 1151, 1153, 1155, 1157, or 1159.

28. A vector comprising the nucleic acid sequence of claim 26.

29. A vector comprising the nucleic acid sequence of claim 27.

30. A mammalian cell comprising the vector of claim 28.

31. A mammalian cell comprising the vector of claim 29.

32. A pharmaceutical composition comprising the antibody or antigen-binding fragment of claim 1 and a pharmaceutically acceptable carrier.

33. A pharmaceutical composition comprising the antibody or antigen-binding fragment of claim 7 and a pharmaceutically acceptable carrier.

34. A method of treating cancer in a patient comprising administering an effective amount of the pharmaceutical composition of claim 32 to the patient.

35. The method of claim 34, wherein the cancer is a solid tumor.

36. The method of claim 34, wherein the cancer is non-small cell lung cancer, gastric cancer, head and neck squamous cell carcinoma, hepatocellular carcinoma, triple-negative breast cancer, colorectal cancer, pancreatic cancer, or metastatic castrate-resistant prostate cancer.

37. The method of claim 34, which further comprises administering an effective amount of a PD-1 antagonist antibody to the patient.

38. The method of claim 37, wherein the PD-1 antagonist antibody is a monoclonal antibody.

39. A method of treating cancer in a patient comprising administering an effective amount of the pharmaceutical composition of claim 33 to the patient.

40. The method of claim 39, wherein the cancer is a solid tumor.

41. The method of claim 39, wherein the cancer is non-small cell lung cancer, gastric cancer, head and neck squamous cell carcinoma, hepatocellular carcinoma, triple-negative breast cancer, colorectal cancer, pancreatic cancer, or metastatic castrate-resistant prostate cancer.

42. The method of claim 39, which further comprises administering an effective amount of a PD-1 antagonist antibody to the patient.

43. The method of claim 42, wherein the PD-1 antagonist antibody is a monoclonal antibody.

44. A process for producing an antibody comprising two HCs and two LCs, wherein the process comprises cultivating the mammalian cell of claim 30 under conditions such that the antibody is expressed and recovering the expressed antibody, and wherein:
(a) both HCs comprise an amino acid sequence of SEQ ID NO: 1125 or 1237, or an amino acid sequence that is at least 90% identical to any of the foregoing HC amino acid sequences; and
(b) both LCs comprise an amino acid sequence of SEQ ID NO: 1126, or an amino acid sequence that is at least 90% identical to any of the foregoing LC amino acid sequences.

45. An antibody obtainable by the process of claim 44.

46. A process for producing an antibody comprising two HCs and two LCs, wherein the process comprises cultivating the mammalian cell of claim 31 under conditions such that the antibody is expressed and recovering the expressed antibody, and wherein:
(a) both HCs comprise an amino acid sequence of SEQ ID NO: 1127, 1129, 1131, 1134, 1136, 1138, 1140, 1142, 1144, 1146, 1148, 1150, 1152, 1154, 1156, 1158, 1160, 1238, 1239, 1240, 1241, 1242, 1243, 1244, 1245, 1246, 1247, 1248, 1249, 1250, 1251, 1252, 1253, or 1254, or an amino acid sequence that is at least 90% identical to any of the foregoing HC amino acid sequences; and
(b) both LCs comprise an amino acid sequence of SEQ ID NO: 1128, 1130, 1132, 1133, 1135, 1137, 1139, 1141, 1143, 1145, 1147, 1149, 1151, 1153, 1155, 1157, or 1159, or an amino acid sequence that is at least 90% identical to any of the foregoing LC amino acid sequences.

47. An antibody obtainable by the process of claim 46.

48. A method of treating cancer in a patient, comprising administering to the patient an effective amount of a Treg depleting antibody and one or more of a bispecific T-cell engager molecule, an agonist of a T cell co-stimulatory receptor, and an antagonist of the PD-1/PD-L1 pathway.

49. The method of claim 48, comprising administering an effective amount of a Treg depleting antibody and a bispecific T-cell engager molecule.

50. The method of claim 49, further comprising administering an antagonist of the PD-1/PD-L1 pathway.

51. The method of claim 48, wherein the Treg depleting antibody is an anti-CCR8 antibody.

52. The method of claim 48, wherein the Treg depleting antibody is an anti-CTLA-4 antibody.

53. The method of claim 48, wherein the antagonist of the PD-1/PD-L1 pathway is a PD-1 antagonist antibody.

54. A method of treating cancer in a patient comprising administering to the patient an effective amount of an antibody or antigen-binding fragment thereof that binds human CCR8 at an epitope, wherein the epitope comprises at least one residue of SEQ ID NO: 82.

55. The method of claim 54, wherein the antibody does not block ligand binding to CCR8.

56. The method of claim 54, wherein the epitope comprises a threonine at position 4 of SEQ ID NO: 82.

57. The method of claim 54, wherein the epitope is determined by anti-CCR8 antibody or antigen-binding fragment thereof binding to a T4R mutation in cynomolgus monkey CCR8.
